United States Patent Application Publication US 2024/0117330 A1 - sequence listing, part 2

SEQ ID NO: 3494 - protein, 186 aa, unidentified
  REGION 1..186: note = Description of Unknown: uncultivated organism with predicted taxonomy: Bacteroidales
  REGION 1..186: note = MG22-24 RuvC-III domain
NDTRYIARFMKGILSNIVREKNADGTLEPEETSKNLIVCSGRITDRVKQDWGLNDIWNHIITSRFERLNTKTSSNDFGEYVCKEGKRYFQTRVPLNLQKGFNKKRIDHRHHAMDAIAIACVNRSIVNYLNNAAANQTEREDLRRAVCIPERNGQTKRQLRSPWHCFARDAENALRQIVVSFKQNLR

SEQ ID NO: 3495 - protein, 186 aa, unidentified
  REGION 1..186: note = Description of Unknown: uncultivated organism with predicted taxonomy: Prevotella sp. MGM2
  REGION 1..186: note = MG22-25 RuvC-III domain
NDTRYIARFMKGILSNIVREKNADGTLEPEETSKNLIVCSGRITDRVKQDWGLNDIWNHIITPRFERLNTKTSSNDFGEYVCKDGKRYFQTRVPLNLQKGFNKKRIDHRHHAMDAIAIACVNRSIVNYLNNAAANPTEREDLRRAVCIPERNGQTKRQLRSPWHCFARDAENALRQIVVSFKQNLR

SEQ ID NO: 3496 - protein, 186 aa, unidentified
  REGION 1..186: note = Description of Unknown: uncultivated organism with predicted taxonomy: Bacteroidales
  REGION 1..186: note = MG22-26 RuvC-III domain
NDTRYIARFMKGILSNIVREKNADGTLEPEETSKNLIVCSGRITDRVKQDWGLNDIWNHIITPRFERLNKKTSSNDFGEYVCKEGKRYFQTRVPLNLQKGFNKKRIDHRHHAMDAIAIACINRSIVNYLNNAAANQTEREDLRRAVCIPERNGQTKRQLRSPWHCFARDAENALRQIVVSFKQNLR

SEQ ID NO: 3497 - protein, 186 aa, unidentified
  REGION 1..186: note = Description of Unknown: uncultivated organism with predicted taxonomy: Prevotella sp. MGM2
  REGION 1..186: note = MG22-27 RuvC-III domain
NDTRYIARFMKGILSNIVREKNADGTLEPEETSKNLIVCSGRITDRVKQDWGLNDIWNHIITPRFERLNTKTSSDKFGEYVCKEGKRYFQTRVPLSLQKGFNKKRIDHRHHAMDAIAIACVNRSIVNYLNNAAANQTEREDLRRAVCIPGRNGQTKRQLRSPWHCFARDAENALRQIVVSFKQNLR

SEQ ID NO: 3498 - protein, 186 aa, unidentified; identical to SEQ ID NO: 3478
  REGION 1..186: note = Description of Unknown: uncultivated organism with predicted taxonomy: Bacteroidales
  REGION 1..186: note = MG22-28 RuvC-III domain

SEQ ID NO: 3499 - protein, 186 aa, unidentified
  REGION 1..186: note = Description of Unknown: uncultivated organism with predicted taxonomy: Bacteroidales
  REGION 1..186: note = MG22-29 RuvC-III domain
NDTRYIARFMKGILSNIVREKNADGTLEPEETSKNLIVCSGRITDRVKQDWGLNDIWNHIITPRFERLNTKTSSDKFGEYVCKEGKRYFQTRVPLSLQKGFNKKRIDHRHHAMDAIAIACVNRSIVNYLNNAAANQTEREDLRRAVCIPERNGQTKRQLRSPWHCFARDAENALRQIVVSFKQNLR

SEQ ID NO: 3500 - protein, 186 aa, unidentified
  REGION 1..186: note = Description of Unknown: uncultivated organism with predicted taxonomy: Prevotella sp. MGM2
  REGION 1..186: note = MG22-30 RuvC-III domain
NDTRYIARFMKGILSNIVREKNADGTLEPEETSKNLIVCSGRITDRVKQDWGLNDIWNHIITPRFERLNKKTSSNDFGEYVCKEGKRYFQTRVPLNLQKGFNKKRIDHRHHAMDAIAIACVNRSIVNYLNNAAANQTEREDLRRAVCIPERNGQTKRQLRSPWHCFARDAENALRQIIVSFKQNLR

SEQ ID NO: 3501 - protein, 186 aa, unidentified; identical to SEQ ID NO: 3478
  REGION 1..186: note = Description of Unknown: uncultivated organism with predicted taxonomy: Bacteroidales
  REGION 1..186: note = MG22-31 RuvC-III domain

SEQ ID NO: 3502 - protein, 186 aa, unidentified; identical to SEQ ID NO: 3478
  REGION 1..186: note = Description of Unknown: uncultivated organism with predicted taxonomy: Bacteroidales
  REGION 1..186: note = MG22-33 RuvC-III domain

SEQ ID NO: 3503 - protein, 185 aa, unidentified
  REGION 1..185: note = Description of Unknown: uncultivated organism with predicted taxonomy: Bacteroidales
  REGION 1..185: note = MG22-34 RuvC-III domain
TDTRYIARFMMGVLSNIVRQNDNGVLESEAISKNLIVCNGKITDRVKQDWGLNDVWNHIVTPRFKRLNQITNSSDFGEWCNKEGKRYFQTRIPLELQKGVNKKRIDHRHHAMDAIAIACTTRSLVNYLNNQSAHTKAREDYRQRLCRTDGHGQTKRLLRAPWKDFAKDAESALQQIVVSFKQNTR

SEQ ID NO: 3504 - protein, 185 aa, unidentified; identical to SEQ ID NO: 3503
  REGION 1..185: note = Description of Unknown: uncultivated organism with predicted taxonomy: Parabacteroides sp. An277
  REGION 1..185: note = MG22-35 RuvC-III domain

SEQ ID NO: 3505 - protein, 185 aa, unidentified; identical to SEQ ID NO: 3493
  REGION 1..185: note = Description of Unknown: uncultivated organism with predicted taxonomy: Bacteroidales
  REGION 1..185: note = MG22-36 RuvC-III domain

SEQ ID NO: 3506 - protein, 186 aa, unidentified
  REGION 1..186: note = Description of Unknown: uncultivated organism with predicted taxonomy: Bacteroidales
  REGION 1..186: note = MG22-37 RuvC-III domain
NDTRYIARFMKGILSNIVREKNADGTLEPEETSKNLIVCSGRITDRVKQDWGLNDIWNHIITPRFERLNTKTSSNDFGEYVCKDGKRYFQTRVPLNLQKGFNKKRIDHRHHAMDAIAIACVNRSIVNYLNNAAANQTEREDLRRAVCIPERNGQTKRQLRSPWHCFARDAENVLRQIVVSFKQNLR

SEQ ID NO: 3507 - protein, 186 aa, unidentified
  REGION 1..186: note = Description of Unknown: uncultivated organism with predicted taxonomy: Prevotella
  REGION 1..186: note = MG22-38 RuvC-III domain
NDTRYIARFMKGILSNIVREKNADGTLEPEETSKNLIVCSGRITDRVKQDWGLNDIWNHIVTPRFERLNTKTSSNDFGEYVCKEGKRYFQTRMPLSLQKGFNKKRIDHRHHAMDAIAIACVNRSIVNYLNNAAANQTEREDLRRAVCIPERNGQTKRQLRSPWHCFARDAENALRQIVVSFKQNLR

SEQ ID NO: 3508 - protein, 186 aa, unidentified; identical to SEQ ID NO: 3478
  REGION 1..186: note = Description of Unknown: uncultivated organism with predicted taxonomy: Prevotella sp. MGM2
  REGION 1..186: note = MG22-39 RuvC-III domain

SEQ ID NO: 3509 - protein, 185 aa, unidentified; identical to SEQ ID NO: 3503
  REGION 1..185: note = Description of Unknown: uncultivated organism with predicted taxonomy: Bacteroidales
  REGION 1..185: note = MG22-40 RuvC-III domain

SEQ ID NO: 3510 - protein, 186 aa, unidentified
  REGION 1..186: note = Description of Unknown: uncultivated organism with predicted taxonomy: Bacteroidales
  REGION 1..186: note = MG22-41 RuvC-III domain
NDTRYIARFMKGILSNIVREKNADGTLEPEETSKNLIVCSGRITDRVKQDWGLNDIWNHIITPRFERLNKKTSSNDFGEYVCKEGKRYFQTRVPLNLQKGFNKKRIDHRHHAMDAIAIACVNRSIVNYLNNAAANQTEREDLRRAVCIPERNGQTKRQLRSPWHCFARDAENALQQIVVSFKQNLR

SEQ ID NO: 3511 - protein, 186 aa, unidentified; identical to SEQ ID NO: 3494
  REGION 1..186: note = Description of Unknown: uncultivated organism with predicted taxonomy: Prevotella
  REGION 1..186: note = MG22-42 RuvC-III domain

SEQ ID NO: 3512 - protein, 186 aa, unidentified
  REGION 1..186: note = Description of Unknown: uncultivated organism with predicted taxonomy: Bacteroidales
  REGION 1..186: note = MG22-43 RuvC-III domain
NDTRYIARFMKGILSNIVREKNADGTLESEETSKNLIVCSGRITDRVKQDWGLNDIWNHIITPRFERLNTKTSSDKFGEYVCKEGKRYFQTRVPLNLQKGFNKKRIDHRHHAMDAIAIACVNRSIVNYLNNAAANQTEREDLRRAVCIPERNGQTKRQLRSPWRNFAKDAENALRQIVVSFKQNLR

SEQ ID NO: 3513 - protein, 186 aa, unidentified
  REGION 1..186: note = Description of Unknown: uncultivated organism with predicted taxonomy: Bacteroidales
  REGION 1..186: note = MG22-44 RuvC-III domain
NDTRYIARFMKGILSNIVREKNADGTLEPEETSKNLIVCSGRITDRVKQDWGLNDIWNHIVTPRFERLNTKTSSNDFGEYVCKDGKRYFQTRVPLNLQKGFNKKRIDHRHHAMDAIAIACVNRSIVNYLNNAAANQTEREDLRRAVCIPERNGQTKRQLRSPWPCFARDTENALRQIVVSFKQNLR

SEQ ID NO: 3514 - protein, 186 aa, unidentified; identical to SEQ ID NO: 3513
  REGION 1..186: note = Description of Unknown: uncultivated organism with predicted taxonomy: Bacteroidales
  REGION 1..186: note = MG22-45 RuvC-III domain

SEQ ID NO: 3515 - protein, 185 aa, unidentified; identical to SEQ ID NO: 3503
  REGION 1..185: note = Description of Unknown: uncultivated organism with predicted taxonomy: Bacteroidales
  REGION 1..185: note = MG22-46 RuvC-III domain

SEQ ID NO: 3516 - protein, 186 aa, unidentified; identical to SEQ ID NO: 3478
  REGION 1..186: note = Description of Unknown: uncultivated organism with predicted taxonomy: Bacteroidales
  REGION 1..186: note = MG22-47 RuvC-III domain

SEQ ID NO: 3517 - protein, 185 aa, unidentified; identical to SEQ ID NO: 3503
  REGION 1..185: note = Description of Unknown: uncultivated organism with predicted taxonomy: Bacteroidales
  REGION 1..185: note = MG22-48 RuvC-III domain

SEQ ID NO: 3518 - protein, 186 aa, unidentified
  REGION 1..186: note = Description of Unknown: uncultivated organism with predicted taxonomy: Bacteroidales
  REGION 1..186: note = MG22-49 RuvC-III domain
NDTRYIARFMKGILSNIVREKNADGTLEPEETSKNLIVCSGRITDRVKQDWGLNDIWNHIITPRFERLNTKTSSDKFGEYVCKEGKRYFQTRVPLSLQKGFNKKRIDHRHHAMDAIAIACVNRSIVNYLNNAAANQTEREDLRRAVCIPGRNGQTKRQLRSPWHCFAKDAENALRQIVVSFKQNLR

SEQ ID NO: 3519 - protein, 186 aa, unidentified; identical to SEQ ID NO: 3497
  REGION 1..186: note = Description of Unknown: uncultivated organism with predicted taxonomy: Bacteroidales
  REGION 1..186: note = MG22-50 RuvC-III domain

SEQ ID NO: 3520 - protein, 185 aa, unidentified
  REGION 1..185: note = Description of Unknown: uncultivated organism with predicted taxonomy: Prevotellaceae
  REGION 1..185: note = MG22-51 RuvC-III domain
TDTRYIARFMMGVLSNIVRQNDNGVLESEAISKNLIVCNGKITDRVKQDWGLNDVWNHIVTPRFERLNQITNSSDFGEWCNKEGKRYFQTRIPLELQKRVNKKRIDHRHHAMDAIAIACTTRSLVNYLNNQSAHTKAREDYRQRLCRTDGHGQTKRLLRAPWKDFAKDAESALQQIVVSFKQNTR

SEQ ID NO: 3521 - protein, 6 aa, unidentified
  REGION 1..6: note = Description of Unknown: uncultivated organism with predicted taxonomy: Prevotella sp. MGM2
  REGION 1..6: note = MG22-52 RuvC-III domain
ITNRII

SEQ ID NO: 3522 - protein, 186 aa, unidentified
  REGION 1..186: note = Description of Unknown: uncultivated organism with predicted taxonomy: Bacteroidales
  REGION 1..186: note = MG22-53 RuvC-III domain
NDTRYIARFMKGILSNIVRGKNADGKLEPEETSKNLIVCSGRITDRVKQDWGLNDIWNHIITPRFERLNKKTSSNDFGEYVCKDGKRYFQTRVPLNLQKGFNKKRIDHRHHAMDAIAIACVNRSIVNYLNNAAANQTEREDLRRAVCIPERNGQTKRQLRSPWHCFARDAENALRQIVVSFKQNLR

SEQ ID NO: 3523 - protein, 186 aa, unidentified
  REGION 1..186: note = Description of Unknown: uncultivated organism with predicted taxonomy: Bacteroidales
  REGION 1..186: note = MG22-54 RuvC-III domain
NDTRYIARFMKGILSNIVREKNADGTLEPEETSKNLIVCSGRITDRVKQDWGLNDIWNHIVTPRFERLNTKTSSNDFGEYVCKDGKRYFQTRVPLNLQKGFNKKRIDHRHHAMDAIAIACVNRSIVNYLNNAAANQTKREDLRRAVCIPERNGQTKRQLRSPWPCFARDTENALRQIVVSFKQNLR

SEQ ID NO: 3524 - protein, 186 aa, unidentified; identical to SEQ ID NO: 3523
  REGION 1..186: note = Description of Unknown: uncultivated organism with predicted taxonomy: Bacteroidales
  REGION 1..186: note = MG22-55 RuvC-III domain

SEQ ID NO: 3525 - protein, 186 aa, unidentified
  REGION 1..186: note = Description of Unknown: uncultivated organism with predicted taxonomy: Bacteroidales
  REGION 1..186: note = MG22-56 RuvC-III domain
NDTRYIARFMKGILSNIVREKNADGTLEQEETSKNLIVCSGRITDRVKQDWGLNDIWNHIITPRFERLNTKTSSDKFGEYVCKEGKRYFQTRVPLSLQKGFNKKRIDHRHHAMDAIAIACVNRSIVNYLNNAAANQTEREDLRRAVCIPERNGQTKRQLRSPWPCFARDTENALRQIVVSFKQNLR

SEQ ID NO: 3526 - protein, 186 aa, unidentified
  REGION 1..186: note = Description of Unknown: uncultivated organism with predicted taxonomy: Bacteroidales
  REGION 1..186: note = MG22-57 RuvC-III domain
NDTRYIARFMKGILSNIVREKNADGTLEPEETSKNLIVCSGRITDRVKQDWGLNDIWSHIVTPRFERLNTKTSSNDFGEYVCKDGKRYFQTRVPLNLQKGFNKKRIDHRHHAMDAIAIACVNRSIVNYLNNAAANQTEREDLRRAVYIPERNGQTKRQLRSPWHCFARDAENALRQIVVSFKQNLR

SEQ ID NO: 3527 - protein, 186 aa, unidentified; identical to SEQ ID NO: 3495
  REGION 1..186: note = Description of Unknown: uncultivated organism with predicted taxonomy: Bacteroidales
  REGION 1..186: note = MG22-58 RuvC-III domain

SEQ ID NO: 3528 - protein, 186 aa, unidentified; identical to SEQ ID NO: 3492
  REGION 1..186: note = Description of Unknown: uncultivated organism with predicted taxonomy: Bacteroidales
  REGION 1..186: note = MG22-59 RuvC-III domain

SEQ ID NO: 3529 - protein, 186 aa, unidentified; identical to SEQ ID NO: 3497
  REGION 1..186: note = Description of Unknown: uncultivated organism with predicted taxonomy: Bacteroidales
  REGION 1..186: note = MG22-60 RuvC-III domain

SEQ ID NO: 3530 - protein, 186 aa, unidentified
  REGION 1..186: note = Description of Unknown: uncultivated organism with predicted taxonomy: Bacteroidales
  REGION 1..186: note = MG22-61 RuvC-III domain
NDTRYIARFMKGILSNIVREKNADGTLEPEETSKNLIVCSGRITDRVKQDWGLNDIWNHIVTPRFERLNTKTSSNDFGEYVCKEGKRYFQTRVPLNLQKGFNKKRIDHRHHAMDAIAIACVNRSIVNYLNNAAANQIEREDLRRAVCIPERNGQTKRQLRSPWHCFARDAENALRQIVVSFKQNLR

SEQ ID NO: 3531 - protein, 186 aa, unidentified; identical to SEQ ID NO: 3495
  REGION 1..186: note = Description of Unknown: uncultivated organism with predicted taxonomy: Bacteroidales
  REGION 1..186: note = MG22-62 RuvC-III domain

SEQ ID NO: 3532 - protein, 186 aa, unidentified
  REGION 1..186: note = Description of Unknown: uncultivated organism with predicted taxonomy: Prevotella sp. MGM2
  REGION 1..186: note = MG22-64 RuvC-III domain
NDTRYIARFMKGILSNIVREKNADGTLEPEETSKNLIVCSGRITDRVKQDWGLNDIWNHIVTPRFERLNTKTSSNDFGEYVCKEGKRYFQTRVPLNLQKGFNKKRIDHRHHAMDAIAIACVNRSIVNYLNNAAANQTEREDLRRAVCIPERNGQTKRQLRSPWHCFARDAENALRQIVVSFKQNLR

SEQ ID NO: 3533 - protein, 186 aa, unidentified
  REGION 1..186: note = Description of Unknown: uncultivated organism with predicted taxonomy: Prevotella
  REGION 1..186: note = MG22-65 RuvC-III domain
NDTRYIARFMKGILSNIVREKNADGTLEPEETSKNLIVCSGRITDRVKQDWGLNDIWNHIVTPRFERLNTKTSSNDFGEYVCKDGKRYFQTRVPLNLQKGFNKKRIDHRHHAMDAIAIACVNRSIVNYLNNAAANQTEREDLRRAVCIPERNGQTKRQLRSPWHCFARDAENALRQIIVSFKQNLR

SEQ ID NO: 3534 - protein, 40 aa, unidentified
  REGION 1..40: note = Description of Unknown: uncultivated organism with predicted taxonomy: Prevotella sp. MGM2
  REGION 1..40: note = MG22-66 RuvC-III domain
NDTRYIARFMKGILSNIVREKNADGTLEPEETSKNLIVCS

SEQ ID NO: 3535 - protein, 186 aa, unidentified; identical to SEQ ID NO: 3497
  REGION 1..186: note = Description of Unknown: uncultivated organism with predicted taxonomy: Bacteroidales
  REGION 1..186: note = MG22-68 RuvC-III domain

SEQ ID NO: 3536 - protein, 186 aa, unidentified
  REGION 1..186: note = Description of Unknown: uncultivated organism with predicted taxonomy: Bacteroidales
  REGION 1..186: note = MG22-69 RuvC-III domain
NDTRYIARFMKGILSNIVREKNADGTLEPEETSKNLIVCSGRITDRVKQDWGLNDIWNHIVTPRFERLNTKTSSNDFGEYVCKEGKRYFQTRVPLNLQKGFNKKRIDHRHHAMDAITIACVNRSIVNYLNNAAANQTEREDLRRAVCIPERNGQTKRQLRSPWHCFARDAENALRQIVVSFKQNLR

SEQ ID NO: 3537 - protein, 186 aa, unidentified
  REGION 1..186: note = Description of Unknown: uncultivated organism with predicted taxonomy: Bacteroidales
  REGION 1..186: note = MG22-70 RuvC-III domain
NDTRYIARFMKGILSNIVREKNADGTLEPEETSKNLIVCSGRITDRVKQDWGLNDIWNHIITPRFERLNTKTSSNDFGEYVCKDGKRYFQTRVPLNLQKGFNKKRIDHRHHAMDAIAIACVNRSIVNYLNNAAANQTEREDLRRAVCIPERNGQTKRQLRSPWPCFARDAENALRQIVVSFKQNLR

SEQ ID NO: 3538 - protein, 185 aa, unidentified; identical to SEQ ID NO: 3520
  REGION 1..185: note = Description of Unknown: uncultivated organism with predicted taxonomy: Bacteroidales
  REGION 1..185: note = MG22-71 RuvC-III domain

SEQ ID NO: 3539 - protein, 186 aa, unidentified
  REGION 1..186: note = Description of Unknown: uncultivated organism with predicted taxonomy: Bacteroidales
  REGION 1..186: note = MG22-72 RuvC-III domain
NDTRYIARFMKGILSNIVREKNADGTLEPEETSKNLIVCSGRITDRVKQDWGLNDIWNHIVTPRFERLNTKTSSNDFGEYVCKDGKRYFQTRVPLNLQKGFNKKRIDHRHHAMDAIAIACVNRSIVNYLNNAAANQTEREDLRRAVCIPERNGQTKRQLRSPWHCFARDAENALRQIVVSFKQNLR

SEQ ID NO: 3540 - protein, 186 aa, unidentified; identical to SEQ ID NO: 3487
  REGION 1..186: note = Description of Unknown: uncultivated organism with predicted taxonomy: Prevotella sp. MGM2
  REGION 1..186: note = MG22-73 RuvC-III domain

SEQ ID NO: 3541 - protein, 186 aa, unidentified; identical to SEQ ID NO: 3487
  REGION 1..186: note = Description of Unknown: uncultivated organism with predicted taxonomy: Bacteroidales
  REGION 1..186: note = MG22-74 RuvC-III domain

SEQ ID NO: 3542 - protein, 186 aa, unidentified
  REGION 1..186: note = Description of Unknown: uncultivated organism with predicted taxonomy: Bacteroidales
  REGION 1..186: note = MG22-75 RuvC-III domain
NDTRYIARFMKGILSNIVREKNADGTLELEETSKNLIVCSGRITDRIKQDWGLNDVWNHIITPRFERLNQKTSSDNFGEYVCKEGKRYFQTRVPLNLQKGFNKKRIDHRHHAIDAIAIACVNRSIVNYLNNAAANQTEREDLRRAVCIPERNGQTKRQLRSPWRNFAKDAENALRQIVVSFKQNLR

SEQ ID NO: 3543 - protein, 186 aa, unidentified; identical to SEQ ID NO: 3475
  REGION 1..186: note = Description of Unknown: uncultivated organism with predicted taxonomy: Bacteroidales
  REGION 1..186: note = MG22-76 RuvC-III domain

SEQ ID NO: 3544 - protein, 186 aa, unidentified; identical to SEQ ID NO: 3507
  REGION 1..186: note = Description of Unknown: uncultivated organism with predicted taxonomy: Prevotella
  REGION 1..186: note = MG22-77 RuvC-III domain

SEQ ID NO: 3545 - protein, 186 aa, unidentified; identical to SEQ ID NO: 3492
  REGION 1..186: note = Description of Unknown: uncultivated organism with predicted taxonomy: Bacteroidales
  REGION 1..186: note = MG22-78 RuvC-III domain

SEQ ID NO: 3546 - protein, 186 aa, unidentified
  REGION 1..186: note = Description of Unknown: uncultivated organism with predicted taxonomy: Bacteroidales
  REGION 1..186: note = MG22-79 RuvC-III domain
NDTRYIARFMKGILSNIVREKNTDGTLEPEETSKNLIVCSGRITDRVKQDWGLNDIWNHIITPRFERLNTKTSSNDFGEYVCKEGKRYFQTRVPLNLQKGFNKKRIDHRHHAMDAIAIACVNRSIVNYLNNAAANQTEREDLRRAVCIPERNGQTKRQLRSPWHCFARDTENALRQIVVSFKQNLR

SEQ ID NO: 3547 - protein, 186 aa, unidentified
  REGION 1..186: note = Description of Unknown: uncultivated organism with predicted taxonomy: Bacteroidales
  REGION 1..186: note = MG22-80 RuvC-III domain
NDTRYIARFMKGILSNIVREKNADGTLEPEETSKNLIVCSGRITDSVKQDWGLNDIWNHIITPRFERLNTKTSSNDFGEYVCKDGKRYFQTRVPLNLQKGFNKKRIDHRHHAMDAIAIACVNRSIVNYLNNAAANPTEREDLRRAVCIPERNGQTKRQLRSPWHCFARDAENALRQIVVSFKQNLR

SEQ ID NO: 3548 - protein, 185 aa, unidentified; identical to SEQ ID NO: 3520
  REGION 1..185: note = Description of Unknown: uncultivated organism with predicted taxonomy: Bacteroidales
  REGION 1..185: note = MG22-81 RuvC-III domain

SEQ ID NO: 3549 - protein, 186 aa, unidentified; identical to SEQ ID NO: 3533
  REGION 1..186: note = Description of Unknown: uncultivated organism with predicted taxonomy: Prevotella
  REGION 1..186: note = MG22-82 RuvC-III domain

SEQ ID NO: 3550 - protein, 186 aa, unidentified
  REGION 1..186: note = Description of Unknown: uncultivated organism with predicted taxonomy: Prevotella
  REGION 1..186: note = MG22-83 RuvC-III domain
NDTRYIARFMKGILSNIVREKNADGTLEPEETSKNLIVCSGRITDRVKQDWGLNDIWSHIVTPRFERLNTKTSSNDFGEYVCKDGKRYFQTRVPLNLQKGFNKKRIDHRHHAMDAIAIACVNRSIVNYLNNAAANQTEREDLRRAVCIPERNGQTKRQLRSPWHCFARDAENALRQIVVSFKQNLR

SEQ ID NO: 3551 - protein, 186 aa, unidentified
  REGION 1..186: note = Description of Unknown: uncultivated organism with predicted taxonomy: Bacteroidales
  REGION 1..186: note = MG22-84 RuvC-III domain
NDTRYIARFMKGILSNIVREKNADGTLEQEETSKNLIVCSGRITDRVKQDWGLNDIWNHIITPRFERLNTKTSSDKFGEYVCKEGKRYFQTRVPLSLQKGFNKKRIDHRHHAMDAIAIACVNRSIVNYLNNAAANQTEREDLRRAVCIPERNGQTKRQLRSPWHCFARDTENALRQIVVSFKQNLR

SEQ ID NO: 3552 - protein, 186 aa, unidentified
  REGION 1..186: note = Description of Unknown: uncultivated organism with predicted taxonomy: Prevotella
  REGION 1..186: note = MG22-85 RuvC-III domain
NDTRYIARFMKGILSNIVREKNADGTLEPEETSKNLIVCSGRITDRVKQDWGLNDIWNHIITQRFERLNKKTSSNDFGEYVCKDGKRYFQTRVPLNLQKGFNKKRIDHRHHAMDAIAIACVNRSIVNYLNNAAANQTEREDLRRAVCIPERNGQTKRQLRSPWHCFARDAENALRQIVVSFKQNLR

SEQ ID NO: 3553 - protein, 186 aa, unidentified; identical to SEQ ID NO: 3491
  REGION 1..186: note = Description of Unknown: uncultivated organism with predicted taxonomy: Bacteroidales
  REGION 1..186: note = MG22-86 RuvC-III domain

SEQ ID NO: 3554 - protein, 157 aa, unidentified
  REGION 1..157: note = Description of Unknown: uncultivated organism with predicted taxonomy: Prevotella sp. MGM2
  REGION 1..157: note = MG22-87 RuvC-III domain
NDTRYIARFMKGILSNIVREKNADGTLEPEETSKNLIVCSGRITDRVKQDWGLNDIWNHIVTPRFERLNTKTSSNDFGEYVCKEGKQYFQTRVPLNLQKGFNKKRIDHRHHAMDAIAIACVNRSIVNYLNNAAANQIEREALRRAVCIPERNGQTKR

SEQ ID NO: 3555 - protein, 186 aa, unidentified; identical to SEQ ID NO: 3522
  REGION 1..186: note = Description of Unknown: uncultivated organism with predicted taxonomy: Prevotella sp. MGM2
  REGION 1..186: note = MG22-88 RuvC-III domain

SEQ ID NO: 3556 - protein, 186 aa, unidentified; identical to SEQ ID NO: 3491
  REGION 1..186: note = Description of Unknown: uncultivated organism with predicted taxonomy: Prevotella sp. MGM2
  REGION 1..186: note = MG22-89 RuvC-III domain

SEQ ID NO: 3557 - protein, 186 aa, unidentified
  REGION 1..186: note = Description of Unknown: uncultivated organism with predicted taxonomy: Bacteroidales
  REGION 1..186: note = MG22-90 RuvC-III domain
NDTRYIARFMKGILSNIVREKNTDGTLEPEETSKNLIVCSGRITDRVKQDWGLNDIWNHIITPRFERLNTKTSSNDFGEYVCKDGKRYFQTRVPLNLQKGFNKKRIDHRHHAMDAIAIACVNRSIVNYLNNAAANQTEREDLRRAVCIPERNGQTKRQLRSPWPCFARDTENALRQIVVSFKQNLR

SEQ ID NO: 3558 - protein, 186 aa, unidentified
  REGION 1..186: note = Description of Unknown: uncultivated organism with predicted taxonomy: Prevotella
  REGION 1..186: note = MG22-91 RuvC-III domain
NDTRYIVRFMKGILSNIVRGKNADGKLEPEETSKNLIVCSGRITDRVKQDWGLNDIWNHIITPRFERLNKKTSSNDFGEYVCKDGKRYFQTRVPLNLQKGFNKKRIDHRHHAMDAIAIACVNRSIVNYLNNAAANQTEREDLRRAVCIPERNGQTKRQLRSPWHCFARDAENALRQIVVSFKQNLR

SEQ ID NO: 3559 - protein, 186 aa, unidentified; identical to SEQ ID NO: 3485
  REGION 1..186: note = Description of Unknown: uncultivated organism with predicted taxonomy: Bacteroidales
  REGION 1..186: note = MG22-92 RuvC-III domain

SEQ ID NO: 3560 - protein, 8 aa, unidentified
  REGION 1..8: note = Description of Unknown: uncultivated organism with predicted taxonomy: Bacteroides
  REGION 1..8: note = MG22-93 RuvC-III domain
ISMKSTWR

SEQ ID NO: 3561 - protein, 184 aa, unidentified
  REGION 1..184: note = Description of Unknown: uncultivated organism with predicted taxonomy: Prevotella
  REGION 1..184: note = MG22-94 RuvC-III domain
NDTRYISRYIIGELSKLVREEKPDGTLEQEPTSKNVVVLNGSVTDKLKKDWGLVDVWNEIITPRFRRLNEMEGSQRFGQDAEKGGKRYFQITMPLELQRGFQRKRIDHRHHAMDAITIACATRQVINYLNNDHSHAGQGREDLHRAVCRKRGSEWFIRKPWDTFTQDAHARLNQIVISFKQNLR

SEQ ID NO: 3562 - protein, 196 aa, unidentified
  REGION 1..196: note = Description of Unknown: uncultivated organism with predicted taxonomy: Bacteroidales
  REGION 1..196: note = MG22-95 RuvC-III domain
NDTRYISKVVKSLLSNVVRERDEEGNLEAEAISKNVIVPVGAMTDRLKQDWGLKDVWNQLMLPRFRALNDKMAPYRFTKITRRGHEIPAMPLELVKGFSKKRIDHRHHAMDAIAIACTTRRHIQYINGDAGEAEADKSKYIDKQRVIDARRTIRNKIAHRLDGDGKPIFDKPWTTFTEDVKRALENLIVSFKQTNK

SEQ ID NO: 3563 - protein, 187 aa, unidentified
  REGION 1..187: note = Description of Unknown: uncultivated organism with predicted taxonomy: Bacteroidales
  REGION 1..187: note = MG22-96 RuvC-III domain
NDSRYISKLMIGLLSNIVREETDGHLEEEAISKNLIVCTGKVTERLKQDWGLKDVWNEIIRPRFERLNQMEQTERFGHWENKQGKNVFQITIPIELSSSVDRKRIDHRHHAMDAITIACATRNMVNYLSNQASGKTRFDLQHALCIKQKMDAQGNYKWLIRKPWQTFTEDAKTALNEIVVSFKQNLR

SEQ ID NO: 3564 - protein, 187 aa, unidentified
  REGION 1..187: note = Description of Unknown: uncultivated organism with predicted taxonomy: Bacteroidetes
  REGION 1..187: note = MG22-97 RuvC-III domain
NDSRYISKLMIGLLSNIVREDADGQLEEEAISKNLIVCTGKVTERLKQDWGLKDVWNEIIRPRFERLNHMEQSERFGHWENKQGKNVFQITIPLELSSSVDRKRIDHRHHAMDAITIACATRNMVNYLSNQASGKARYDLQHVLCVKQKMDAQGNYKWLIRKPWQTFTEDAKAAIKEIVVSFKQNLR

SEQ ID NO: 3565 - protein, 69 aa, unidentified
  REGION 1..69: note = Description of Unknown: uncultivated organism with predicted taxonomy: Bacteroidales
  REGION 1..69: note = MG22-98 RuvC-III domain
TDTQYIASTMMRLLSNIVREQDPDGSLEREVRSKNPIVCTGGITDKLKKDWGVNDAWNRIILPRFKRMD

SEQ ID NO: 3566 - protein, 196 aa, unidentified
  REGION 1..196: note = Description of Unknown: uncultivated organism with predicted taxonomy: Flavobacteriales
  REGION 1..196: note = MG22-99 RuvC-III domain
NNTRYISRLVMTILSNIVRDDREDGKSDEGIRANRLITCQGGVTDKLKKDWHVNDVWNRIILPRYERMQNEVMKGVTFVTNNSRGHEIPTMPDKLKTEEYNPKRIDHRHHAMDAIVIACATRSIVNFLNNESARDEASEGSEKAKARQTYAELRSLLCVKDADNDEKVIRKPWENFEVDVLKALEDIVVSTKHKQR

SEQ ID NO: 3567 - protein, 184 aa, unidentified
  REGION 1..184: note = Description of Unknown: uncultivated organism with predicted taxonomy: Bacteroidales
  REGION 1..184: note = MG22-100 RuvC-III domain
NDTRYIARFIMGELSKLVRQQNADGTYEEEATSKNVIVLNGAITDKLKKDWGLVDVWNGIIAERFKRLNQMEGGTRFGHEENKDGKRYFQIEMPLELQRGFNRKRIDHRHHAMDAIVIACATRAVVNYLNNDHAHDGAGREDVKRAVSRKRDQTWLINKPWPTFTEEAKEELKQMVVSFKQNLR

SEQ ID NO: 3568 - protein, 184 aa, unidentified
  REGION 1..184: note = Description of Unknown: uncultivated organism with predicted taxonomy: Bacteroidales
  REGION 1..184: note = MG22-101 RuvC-III domain
NDTRYISRFIIGELSKLVREHNPDGTLEQEAVSKNILILNGAVTDKLKKDWGLVDVWNGIIAPRFRRLNAMEGSQRFGHEAMKDGKRYFQIEMPLELQRGFQRKRIDHRHHAMDAIAIACATRNVVNYLNNDHSHEGAGREDIKRAVSSKRSGQWLVNKPWSTFTQEARKQLQQIVVSFKQNLR

SEQ ID NO: 3569 - protein, 139 aa, unidentified
  REGION 1..139: note = Description of Unknown: uncultivated organism with predicted taxonomy: Clostridia
  REGION 1..139: note = MG23-1 RuvC-III domain
VETRQGTKAIADILKQALPDTEIVYVKAGLVSDFRQKFELYKVRALNDTHHAKDAYLNIVVGNTYSTKFTNNPLNFIKAGAKRPQDNQFKYNMDKIFDYNVISRGERAWIAGSDGSICTVKKFMSRNTVLITRKAKEVH

SEQ ID NO: 3570 - protein, 143 aa, unidentified
  REGION 1..143: note = Description of Unknown: uncultivated organism with predicted taxonomy: Firmicutes
  REGION 1..143: note = MG23-3 RuvC-III domain
VETRQGTKAITKILQQAFPDDDMEVVFTKAGVAAKLRHDFDLVKVRCVNDTHHAHDAYLNIVAGNVYNAKFTSNPLRFIKNEVKKGNASYHMDKIFFRDVKRGNKLVWQAPNNEEKTPGTIAIVREQLARRTVLQTRRSYMAH

SEQ ID NO: 3571 - protein, 142 aa, unidentified
  REGION 1..142: note = Description of Unknown: uncultivated organism with predicted taxonomy: Clostridiales
  REGION 1..142: note = MG23-4 RuvC-III domain
VETRQGTKAIIQILRQIFPDTMVVFSKAGEVSAFRHKFNLEKVRCLNDFHHAQDAYLNIVVGNAYYVKFTANPINFIREAEKNPQKDLYKYHMDKFFEYTVQRGDETAWIGTKDEKNSTIHIVKKVMARNTPLITKRCYTVH

SEQ ID NO: 3572 - protein, 143 aa, unidentified
  REGION 1..143: note = Description of Unknown: uncultivated organism with predicted taxonomy: Firmicutes
  REGION 1..143: note = MG23-5 RuvC-III domain
VETRQGTKAITQILKRVFKNEAVEIIFTKAELISDFRRIFDLPKVRCVNSTHHAHDAYLNIVVGNVYNAKFTKHPRHFIEECQRKGSYDYNMYRMFDYDVKCGSKIVWCGSKITTCGKGTISTVKKQLQKRSVLLTKKSFMKH

SEQ ID NO: 3573 - protein, 143 aa, unidentified
  REGION 1..143: note = Description of Unknown: uncultivated organism with predicted taxonomy: Clostridiales
  REGION 1..143: note = MG23-6 RuvC-III domain
VETRQGTKAITQILKEAFKNDDTRIVFTKAEVTADFRHKYDLPKARSVNNLHHAHDAYLNIVAGNVYDAKFTSHPINFIKECRNKGVFNYNMAKVFDYNVKRGNRYVWIAQNDGMDMPLTIERVKNQLARNTILMTRRSYMAH

SEQ ID NO: 3574 - protein, 142 aa, unidentified; identical to SEQ ID NO: 3571
  REGION 1..142: note = Description of Unknown: uncultivated organism with predicted taxonomy: Clostridiales
  REGION 1..142: note = MG23-7 RuvC-III domain

SEQ ID NO: 3575 - protein, 142 aa, unidentified
  REGION 1..142: note = Description of Unknown: uncultivated organism with predicted taxonomy: Clostridiales
  REGION 1..142: note = MG23-8 RuvC-III domain
VETRQGTKAITQILRQIFPDTMVVFSKAGEVSAFRHKFNLEKVRCLNDFHHAQDAYLNIVVGNAYYVKFTANPINFIREAEKNPQKDLYKYHMDKFFEYTVQRGDETAWIGTKDEKNSTIHIVKKVMARNTPLITKRCYTVH

SEQ ID NO: 3576 - protein, 142 aa, unidentified; identical to SEQ ID NO: 3575
  REGION 1..142: note = Description of Unknown: uncultivated organism with predicted taxonomy: Clostridiales
  REGION 1..142: note = MG23-9 RuvC-III domain

SEQ ID NO: 3577 - protein, 139 aa, unidentified
  REGION 1..139: note = Description of Unknown: uncultivated organism with predicted taxonomy: Clostridiales
  REGION 1..139: note = MG23-10 RuvC-III domain
VETGQGTKVITQILKQAFPDTQVVFVKARMVSDFRHEFGINKVRELNDTHHAKDAYLNIVVGNTYYTKFTNNPINFMKNAEKNPEDVQYKYNMDKIFRYNVIRNGETAWIADNGVTKQHVIKTINRNTVTITRKTEEVH

SEQ ID NO: 3578 - protein, 139 aa, unidentified
  REGION 1..139: note = Description of Unknown: uncultivated organism with predicted taxonomy: Butyrivibrio sp. CAG:318
  REGION 1..139: note = MG23-11 RuvC-III domain
VETRQGTKAITQVLKQAFPNTQIVFVKAGIVSDFRKKFDINKVRALNDTHHAKDAYLNIVVGNTYYTKFTNNPMNFIKDARKNPKNDFYRYNMDKIFDYNVIRNGEEAWIADNGKTKQHVLRIMKKNSVTITVKTEEYH

SEQ ID NO: 3579 - protein, 139 aa, unidentified
  REGION 1..139: note = Description of Unknown: uncultivated organism with predicted taxonomy: Butyrivibrio sp. CAG:318
  REGION 1..139: note = MG23-12 RuvC-III domain
VETRQGTKAITQVLKQAFPNTQIVFVKAGIVSDFRKKFDINKVRALNDTHHAKDAYLNIVVGNTYYTKFTNNPMNFIKDARKNPKNDFYRYNMDKIFDYNVIRNGEEAWIADNGKTKQHVLRIMKKNSVIITVKTEEAN

SEQ ID NO: 3580 - protein, 139 aa, unidentified
  REGION 1..139: note = Description of Unknown: uncultivated organism with predicted taxonomy: Clostridium sp. AF36-4
  REGION 1..139: note = MG23-13 RuvC-III domain
VETGQGTKVITQILKQAFPDTQVVFVKARMVSDFRHEFGINKVRELNDTHHAKDAYLNIVVGNTYNTKFTNNPINFMKNAEKNPEDVQYKYNMDKIFRYNVIRNGETAWIADNGVTKQHVLKTINRNTVTITRKTEEVH

SEQ ID NO: 3581 - protein, 139 aa, unidentified; identical to SEQ ID NO: 3578
  REGION 1..139: note = Description of Unknown: uncultivated organism with predicted taxonomy: Butyrivibrio sp. CAG:318
  REGION 1..139: note = MG23-14 RuvC-III domain

SEQ ID NO: 3582 - protein, 139 aa, unidentified; identical to SEQ ID NO: 3578
  REGION 1..139: note = Description of Unknown: uncultivated organism with predicted taxonomy: Butyrivibrio sp. CAG:318
  REGION 1..139: note = MG23-15 RuvC-III domain

SEQ ID NO: 3583 - protein, 139 aa, unidentified; identical to SEQ ID NO: 3580
  REGION 1..139: note = Description of Unknown: uncultivated organism with predicted taxonomy: Clostridium sp. AF36-4
  REGION 1..139: note = MG23-16 RuvC-III domain

SEQ ID NO: 3584 - protein, 139 aa, unidentified; identical to SEQ ID NO: 3579
  REGION 1..139: note = Description of Unknown: uncultivated organism with predicted taxonomy: Butyrivibrio sp. CAG:318
  REGION 1..139: note = MG23-17 RuvC-III domain

SEQ ID NO: 3585 - protein, 139 aa, unidentified
  REGION 1..139: note = Description of Unknown: uncultivated organism with predicted taxonomy: Clostridiales
  REGION 1..139: note = MG23-18 RuvC-III domain
VETGQGTKVITQILKQAFPDTQVVFVKARMVSDFRHEFGINKVRELNDTHHAKDAYLNIVVGNTYNTKFTNNPINFMKNAEKNPEDVQYKYNMDKIFRYNVIRNGETAWIADNGTTKQHVIKTINRNTVTITRKTEEVH

SEQ ID NO: 3586 - protein, 139 aa, unidentified; identical to SEQ ID NO: 3578
  REGION 1..139: note = Description of Unknown: uncultivated organism with predicted taxonomy: Butyrivibrio sp. CAG:318
  REGION 1..139: note = MG23-19 RuvC-III domain

SEQ ID NO: 3587 - protein, 139 aa, unidentified; identical to SEQ ID NO: 3578
  REGION 1..139: note = Description of Unknown: uncultivated organism with predicted taxonomy: Butyrivibrio sp. CAG:318
  REGION 1..139: note = MG23-20 RuvC-III domain

SEQ ID NO: 3588 - protein, 48 aa, unidentified
  REGION 1..48: note = Description of Unknown: uncultivated organism with predicted taxonomy: Butyrivibrio sp. CAG:318
  REGION 1..48: note = MG23-21 RuvC-III domain
VETRQGTKAITQVLKQAFPNTQIVFVKAGIVSDFRKKFDINKVRALND

SEQ ID NO: 3589 - protein, 139 aa, unidentified; identical to SEQ ID NO: 3578
  REGION 1..139: note = Description of Unknown: uncultivated organism with predicted taxonomy: Butyrivibrio sp. CAG:318
  REGION 1..139: note = MG23-22 RuvC-III domain

SEQ ID NO: 3590 - protein, 139 aa, unidentified; identical to SEQ ID NO: 3579
  REGION 1..139: note = Description of Unknown: uncultivated organism with predicted taxonomy: Butyrivibrio sp. CAG:318
  REGION 1..139: note = MG23-23 RuvC-III domain

SEQ ID NO: 3591 - protein, 139 aa, unidentified
  REGION 1..139: note = Description of Unknown: uncultivated organism with predicted taxonomy: Clostridiales
  REGION 1..139: note = MG23-24 RuvC-III domain
VETGQGTKVITQILKQAFPDTQVVFVKARMVSDFRHEFGINKVRELNDTHHAKDAYLNIVVGNTYYTKFTNNPINFMKNAEKNPEDVQYKYNMDKIFRYNVIRNGETAWIADNGVTKQHVLKTINRNTVTITRKTEEVH

SEQ ID NO: 3592 - protein, 139 aa, unidentified
  REGION 1..139: note = Description of Unknown: uncultivated organism with predicted taxonomy: Butyrivibrio sp. CAG:318
  REGION 1..139: note = MG23-25 RuvC-III domain
VETRQGTKAITQVLKQAFPNTQIVFVKAGIVSDFRKKFDINKVRALNDTHHAKDAYLNIVVGNTYYTKFTNNPMNFIKDARKNPKNDFYRYNMDKIFDYNVIRNGEEAWIADNGKTKQHVLQIMKKNSVTITVKTEEYH

SEQ ID NO: 3593 - protein, 139 aa, unidentified; identical to SEQ ID NO: 3578
  REGION 1..139: note = Description of Unknown: uncultivated organism with predicted taxonomy: Butyrivibrio sp. CAG:318
  REGION 1..139: note = MG23-26 RuvC-III domain

SEQ ID NO: 3594 - protein, 139 aa, unidentified; identical to SEQ ID NO: 3578
  REGION 1..139: note = Description of Unknown: uncultivated organism with predicted taxonomy: Butyrivibrio sp. CAG:318
  REGION 1..139: note = MG23-27 RuvC-III domain

SEQ ID NO: 3595 - protein, 139 aa, unidentified; identical to SEQ ID NO: 3579
  REGION 1..139: note = Description of Unknown: uncultivated organism with predicted taxonomy: Butyrivibrio sp. CAG:318
  REGION 1..139: note = MG23-28 RuvC-III domain

SEQ ID NO: 3596 - protein, 139 aa, unidentified; identical to SEQ ID NO: 3578
  REGION 1..139: note = Description of Unknown: uncultivated organism with predicted taxonomy: Butyrivibrio sp. CAG:318
  REGION 1..139: note = MG23-29 RuvC-III domain

SEQ ID NO: 3597 - protein, 139 aa, unidentified; identical to SEQ ID NO: 3578
  REGION 1..139: note = Description of Unknown: uncultivated organism with predicted taxonomy: Butyrivibrio sp. CAG:318
  REGION 1..139: note = MG23-30 RuvC-III domain

SEQ ID NO: 3598 - protein, 139 aa, unidentified; identical to SEQ ID NO: 3578
  REGION 1..139: note = Description of Unknown: uncultivated organism with predicted taxonomy: Butyrivibrio sp. CAG:318
  REGION 1..139: note = MG23-31 RuvC-III domain

SEQ ID NO: 3599 - protein, 139 aa, unidentified; identical to SEQ ID NO: 3592
  REGION 1..139: note = Description of Unknown: uncultivated organism with predicted taxonomy: Butyrivibrio sp. CAG:318
  REGION 1..139: note = MG23-32 RuvC-III domain

SEQ ID NO: 3600 - protein, 139 aa, unidentified; identical to SEQ ID NO: 3591
  REGION 1..139: note = Description of Unknown: uncultivated organism with predicted taxonomy: Clostridiales
  REGION 1..139: note = MG23-33 RuvC-III domain

SEQ ID NO: 3601 - protein, 139 aa, unidentified
  REGION 1..139: note = Description of Unknown: uncultivated organism with predicted taxonomy: Butyrivibrio sp. CAG:318
  REGION 1..139: note = MG23-34 RuvC-III domain
VETRQGTKAISQVLKQAFPNTQIVFVKAGIVSDFRKKFDINKVRALNDTHHAKDAYLNIVVGNTYYTKFTNNPMNFIKDARKNPKNDFYRYNMDKIFDYNVIRNGEEAWIADNGKTKQHVLRIMKKNSVTITVKTEEYH

SEQ ID NO: 3602 - protein, 139 aa, unidentified
  REGION 1..139: note = Description of Unknown: uncultivated organism with predicted taxonomy: Butyrivibrio sp. CAG:318
  REGION 1..139: note = MG23-35 RuvC-III domain
VETRQGTKAITQILKQAFPNTQIVFVKAGIVSDFRKKFDINKVRALNDTHHAKDAYLNIVVGNTYYTKFTNNPMNFIKDASKNPKNDFYRYNMDKIFDYNVIRNGEEAWIADNGKTKQHVLRIMKKNSVTITVKTEEYH

SEQ ID NO: 3603 - protein, 139 aa, unidentified; identical to SEQ ID NO: 3591
  REGION 1..139: note = Description of Unknown: uncultivated organism with predicted taxonomy: Clostridiales
  REGION 1..139: note = MG23-36 RuvC-III domain

SEQ ID NO: 3604 - protein, 139 aa, unidentified; identical to SEQ ID NO: 3591
  REGION 1..139: note = Description of Unknown: uncultivated organism with predicted taxonomy: Clostridiales
  REGION 1..139: note = MG23-37 RuvC-III domain

SEQ ID NO: 3605 - protein, 139 aa, unidentified; identical to SEQ ID NO: 3578
  REGION 1..139: note = Description of Unknown: uncultivated organism with predicted taxonomy: Butyrivibrio sp. CAG:318
  REGION 1..139: note = MG23-38 RuvC-III domain

SEQ ID NO: 3606 - protein, 139 aa, unidentified; identical to SEQ ID NO: 3578
  REGION 1..139: note = Description of Unknown: uncultivated organism with predicted taxonomy: Butyrivibrio sp. CAG:318
  REGION 1..139: note = MG23-39 RuvC-III domain

SEQ ID NO: 3607 - protein, 139 aa, unidentified; identical to SEQ ID NO: 3592
  REGION 1..139: note = Description of Unknown: uncultivated organism with predicted taxonomy: Butyrivibrio sp. CAG:318
  REGION 1..139: note = MG23-40 RuvC-III domain

SEQ ID NO: 3608 - protein, 139 aa, unidentified; identical to SEQ ID NO: 3591
  REGION 1..139: note = Description of Unknown: uncultivated organism with predicted taxonomy: Clostridiales
  REGION 1..139: note = MG23-41 RuvC-III domain

SEQ ID NO: 3609 - protein, 139 aa, unidentified; identical to SEQ ID NO: 3592
  REGION 1..139: note = Description of Unknown: uncultivated organism with predicted taxonomy: Butyrivibrio sp. CAG:318
  REGION 1..139: note = MG23-42 RuvC-III domain

SEQ ID NO: 3610 - protein, 139 aa, unidentified; identical to SEQ ID NO: 3578
  REGION 1..139: note = Description of Unknown: uncultivated organism with predicted taxonomy: Butyrivibrio sp. CAG:318
  REGION 1..139: note = MG23-43 RuvC-III domain

SEQ ID NO: 3611 - protein, 139 aa, unidentified; identical to SEQ ID NO: 3579
  REGION 1..139: note = Description of Unknown: uncultivated organism with predicted taxonomy: Butyrivibrio sp. CAG:318
  REGION 1..139: note = MG23-44 RuvC-III domain

SEQ ID NO: 3612 - protein, 97 aa, unidentified
  REGION 1..97: note = Description of Unknown: uncultivated organism with predicted taxonomy: Butyrivibrio sp. CAG:318
  REGION 1..97: note = MG23-45 RuvC-III domain
VETRQGTKAITQVLKQAFPNTQIVFVKAGIVSDFRKKFDINKVRALNDTHHAKDAYLNIVVGNTYYTKFTNNPMNFIKDARKNPKNDFYRYNMDKIF

SEQ ID NO: 3613 - protein, 139 aa, unidentified; identical to SEQ ID NO: 3591
  REGION 1..139: note = Description of Unknown: uncultivated organism with predicted taxonomy: Clostridiales
  REGION 1..139: note = MG23-46 RuvC-III domain

SEQ ID NO: 3614 - protein, 139 aa, unidentified; identical to SEQ ID NO: 3592
  REGION 1..139: note = Description of Unknown: uncultivated organism with predicted taxonomy: Butyrivibrio sp. CAG:318
  REGION 1..139: note = MG23-47 RuvC-III domain

SEQ ID NO: 3615 - protein, 139 aa, unidentified; identical to SEQ ID NO: 3578
  REGION 1..139: note = Description of Unknown: uncultivated organism with predicted taxonomy: Butyrivibrio sp. CAG:318
  REGION 1..139: note = MG23-48 RuvC-III domain

SEQ ID NO: 3616 - protein, 33 aa, unidentified
  REGION 1..33: note = Description of Unknown: uncultivated organism with predicted taxonomy: Clostridiales
  REGION 1..33: note = MG23-49 RuvC-III domain
VETGQGTKVITQILKQAFPDTQVVFVKARMVSD

SEQ ID NO: 3617 - protein, 139 aa, unidentified
  REGION 1..139: note = Description of Unknown: uncultivated organism with predicted taxonomy: Clostridiales
  REGION 1..139: note = MG23-50 RuvC-III domain
VETRQGTKAVTQILKQAFPDTQIIFVKAGVVSDFRKKFNINKVRALNDTHHAKDAYLNIVVGNIYNTKFTSNPINFIKDARKNVNDISYKYNMDKMFDYNVCRNGENAWIADNGKSKQHVLSVLGKNSVIITRKTEENH

SEQ ID NO: 3618 - protein, 139 aa, unidentified; identical to SEQ ID NO: 3591
  REGION 1..139: note = Description of Unknown: uncultivated organism with predicted taxonomy: Clostridiales
  REGION 1..139: note = MG23-51 RuvC-III domain

SEQ ID NO: 3619 - protein, 139 aa, unidentified; identical to SEQ ID NO: 3592
  REGION 1..139: note = Description of Unknown: uncultivated organism with predicted taxonomy: Butyrivibrio sp. CAG:318
  REGION 1..139: note = MG23-52 RuvC-III domain

SEQ ID NO: 3620 - protein, 139 aa, unidentified; identical to SEQ ID NO: 3578
  REGION 1..139: note = Description of Unknown: uncultivated organism with predicted taxonomy: Butyrivibrio sp. CAG:318
  REGION 1..139: note = MG23-53 RuvC-III domain

SEQ ID NO: 3621 - protein, 139 aa, unidentified; identical to SEQ ID NO: 3579
  REGION 1..139: note = Description of Unknown: uncultivated organism with predicted taxonomy: Butyrivibrio sp. CAG:318
  REGION 1..139: note = MG23-54 RuvC-III domain

SEQ ID NO: 3622 - protein, 139 aa, unidentified; identical to SEQ ID NO: 3578
  REGION 1..139: note = Description of Unknown: uncultivated organism with predicted taxonomy: Butyrivibrio sp. CAG:318
  REGION 1..139: note = MG23-55 RuvC-III domain

SEQ ID NO: 3623 - protein, 139 aa, unidentified; identical to SEQ ID NO: 3579
  REGION 1..139: note = Description of Unknown: uncultivated organism with predicted taxonomy: Butyrivibrio sp. CAG:318
  REGION 1..139: note = MG23-56 RuvC-III domain

SEQ ID NO: 3624 - protein, 139 aa, unidentified; identical to SEQ ID NO: 3578
  REGION 1..139: note = Description of Unknown: uncultivated organism with predicted taxonomy: Butyrivibrio sp. CAG:318
  REGION 1..139: note = MG23-57 RuvC-III domain

SEQ ID NO: 3625 - protein, 139 aa, unidentified; identical to SEQ ID NO: 3579
  REGION 1..139: note = Description of Unknown: uncultivated organism with predicted taxonomy: Butyrivibrio sp. CAG:318
  REGION 1..139: note = MG23-58 RuvC-III domain

SEQ ID NO: 3626 - protein, 139 aa, unidentified; identical to SEQ ID NO: 3580
  REGION 1..139: note = Description of Unknown: uncultivated organism with predicted taxonomy: Clostridiales
  REGION 1..139: note = MG23-59 RuvC-III domain

SEQ ID NO: 3627 - protein, 139 aa, unidentified; identical to SEQ ID NO: 3585
  REGION 1..139: note = Description of Unknown: uncultivated organism with predicted taxonomy: Clostridiales
  REGION 1..139: note = MG23-60 RuvC-III domain

SEQ ID NO: 3628 - protein, 139 aa, unidentified; identical to SEQ ID NO: 3601
  REGION 1..139: note = Description of Unknown: uncultivated organism with predicted taxonomy: Butyrivibrio sp. CAG:318
  REGION 1..139: note = MG23-62 RuvC-III domain

SEQ ID NO: 3629 - protein, 139 aa, unidentified; identical to SEQ ID NO: 3579
  REGION 1..139: note = Description of Unknown: uncultivated organism with predicted taxonomy: Butyrivibrio sp. CAG:318
  REGION 1..139: note = MG23-63 RuvC-III domain

SEQ ID NO: 3630 - protein, 139 aa, unidentified; identical to SEQ ID NO: 3591
  REGION 1..139: note = Description of Unknown: uncultivated organism with predicted taxonomy: Clostridiales
  REGION 1..139: note = MG23-64 RuvC-III domain

SEQ ID NO: 3631 - protein, 139 aa, unidentified; identical to SEQ ID NO: 3577
  REGION 1..139: note = Description of Unknown: uncultivated organism with predicted taxonomy: Clostridiales
  REGION 1..139: note = MG23-65 RuvC-III domain

SEQ ID NO: 3632 - protein, 139 aa, unidentified
  REGION 1..139: note = Description of Unknown: uncultivated organism with predicted taxonomy: Butyrivibrio sp. CAG:318
  REGION 1..139: note = MG23-66 RuvC-III domain
VETRQGTKAITQILKQAFPNTQIVFVKAGIVSDFRKKFDINKVRALNDTHHAKDAYLNIVVGNTYYTKFTNNPMNFIKDARKNPKNDFYRYNMDKIFDYNVIRNGEEAWISDNGKTKQHVLRIMKKNSVTITVKTEEAH

SEQ ID NO: 3633 - protein, 139 aa, unidentified; identical to SEQ ID NO: 3579
  REGION 1..139: note = Description of Unknown: uncultivated organism with predicted taxonomy: Butyrivibrio sp. CAG:318
  REGION 1..139: note = MG23-67 RuvC-III domain

SEQ ID NO: 3634 - protein, 139 aa, unidentified
  REGION 1..139: note = Description of Unknown: uncultivated organism with predicted taxonomy: Butyrivibrio sp. CAG:318
  REGION 1..139: note = MG23-68 RuvC-III domain
VETRQGTKAITQILKQAFPNTQIVFVKAGIVSDFRKKFDINKVRALNDTHHAKDAYLNIVVGNTYYTKFTNNPMNFIKDARKNPKNDFYRYNMDKIFDYNVIRNGEEAWIADNGKTKQHVLQIMKKNSVTITVKTEEYH

SEQ ID NO: 3635 - protein, 139 aa, unidentified; identical to SEQ ID NO: 3578
  REGION 1..139: note = Description of Unknown: uncultivated organism with predicted taxonomy: Butyrivibrio sp. CAG:318
  REGION 1..139: note = MG23-69 RuvC-III domain

SEQ ID NO: 3636 - protein, 139 aa, unidentified; identical to SEQ ID NO: 3592
  REGION 1..139: note = Description of Unknown: uncultivated organism with predicted taxonomy: Butyrivibrio sp. CAG:318
  REGION 1..139: note = MG23-70 RuvC-III domain

SEQ ID NO: 3637 - protein, 139 aa, unidentified
  REGION 1..139: note = Description of Unknown: uncultivated organism with predicted taxonomy: Eubacterium
  REGION 1..139: note = MG23-72 RuvC-III domain
VETRQGTKAITQILKQAFPDTQIIFVKAGVVSDFRKKFNINKVRALNDTHHAKDAYLNIVVGNIYNTKFTSNPINFIKDARKNVNDVSYKYNMDKMFDYNVCRNGENAWIADNGKSKQHVLSVLGKNSVIITRKTEENH

SEQ ID NO: 3638 - protein, 162 aa, unidentified
  REGION 1..162: note = Description of Unknown: uncultivated organism with predicted taxonomy: Candidatus Melainabacteria
  REGION 1..162: note = MG1-4 HNH domain
DNSLYGSKKAQDTERFMKQQEKENEQIINELKDAGLYVNGQNHANATYFLMHKLLKSQGGKCIYSGQNISPSNYDECEIDHIYPRTLGGNDALYNKVVCYRRENQDKKGRTPYEWLSPDSDKWANYVNRLNKIKKQLGKKKFELLTSKPEDCEKLIESYNGL

SEQ ID NO: 3639 - protein, 158 aa, unidentified
  REGION 1..158: note = Description of Unknown: uncultivated organism with predicted taxonomy: Verrucomicrobia
  REGION 1..158: note = MG1-5 HNH domain
DDFLGSKAKKEMSQGIKKRFEEKKKLAEELDSQRAEFGNKYASKKMLLKFELYKKQRGRCVYTDNALPLSELENLEVEHIFPRSRGGADAMYNYVLTDENTNKQKGDKTPFEWLSSDKTKWESYCDRVRSLTQSLGAKRCKLLVSPNAEELMQKYTAL

SEQ ID NO: 3640 - protein, 152 aa, unidentified
  REGION 1..152: note = Description of Unknown: uncultivated organism with predicted taxonomy: unclassified Verrucomicrobia (miscellaneous)
  REGION 1..152: note = MG1-6 HNH domain
DDFMGEKEKKEMRIAMKKRAEEKMMIAKDLDEHGFKGGNLLLKMELYRKQNGICLYTGDALPLSELATLEIEHIVPRSRGGPDAQYNYVITREKTNKLKGDKTPYEWLSSDAKEWASYTDRVNACAKALGKKRCRLLLEKDAEELVEKYTAL

SEQ ID NO: 3641 - protein, 152 aa, unidentified
  REGION 1..152: note = Description of Unknown: uncultivated organism with predicted taxonomy: unclassified Verrucomicrobia (miscellaneous)
  REGION 1..152: note = MG1-7 HNH domain
EDFMGKEQKKRMQIEMKKRASEKMLIAKKLDEAGYKGGNLLLKMELLEKQGGVCLYTGEPLLPSELGVLEIEHIVPRSRGGPDAQYNYVLTREKTNKEKADRTPFEWLSSDPVKWAGYSDRVKARAGQLGRKRCELLLEKNAEELVEKYTAL

SEQ ID NO: 3642 - protein, 153 aa, unidentified
  REGION 1..153: note = Description of Unknown: uncultivated organism
  REGION 1..153: note = MG1-1 HNH domain
EDFMGEEAKREYQNFINEREKDRKAAREEAGKLGFDSRSSGLRYELWKAQGCCCLYTGRALAETELDQYEIDHIVPRSLGGPDAIVNYALTFHDINHTKEKGKLTPFTLLHGKPGWAEYLLRVDARATFLRNKKVQLLTRPDAAELVQRYTAL

SEQ ID NO: 3643 - protein, 151 aa, unidentified
  REGION 1..151: note = Description of Unknown: uncultivated organism with predicted taxonomy: Verrucomicrobia
  REGION 1..151: note = MG1-2 HNH domain
EDFMGEKAKIEYRKFLNRREKERKEAREQAGQLGATSGSSGLKMELFKAQRGQCLYSGQRLHETKIEDYVIEHIVPRAKRGPDAVINYVLTTEELNNDKSDHIPFEWPYLKKQWDAYTQRVESCAGALGVKRVRLLVSPDAVELAQKYTAL

SEQ ID NO: 3644 - protein, 167 aa, unidentified
  REGION 1..167: note = Description of Unknown: uncultivated organism
  REGION 1..167: note = MG1-3 HNH domain
DPPRNARQRAERQKEIEANREKREKLFEQYGIEDSGVASKRRRIMLYEQQRGKCPYTGRDLPSNPLDPSLEIEHIFPVEMGGLSVDDNLVLTWRSVNAEKGKRTPLQWAGERFDAMLANTRDMRWSARKREIFAWGTIREDKPDKPSHYNADGTLRVPDFGNTTRTA

SEQ ID NO: 3645 - protein, 167 aa, unidentified; identical to SEQ ID NO: 3644
  REGION 1..167: note = Description of Unknown: uncultivated organism
  REGION 1..167: note = MG1-13 HNH domain

SEQ ID NO: 3646 - protein, 153 aa, unidentified
  REGION 1..153: note = Description of Unknown: uncultivated organism
  REGION 1..153: note = MG1-8 HNH domain
EDFMGEQAKRELQTFQKRREQARAEAEAEAAKLGLESRSSALRYELFKAQGGICLYTGRPLSETQLDQYEIDHIVPRSLGGPDAMVNYVLTFPEVNSAKEKGKLTPYALLHGTDGWDAYVARVKARAAALRNKKVQLLTREDAPELVERYTAL

SEQ ID NO: 3647 - protein, 160 aa, unidentified
  REGION 1..160: note = Description of Unknown: uncultivated organism with predicted taxonomy: Verrucomicrobia
  REGION 1..160: note = MG1-9 HNH domain
DDKDNSLEGRKRTEAIQQALRENEQRRDKARKALEQCGLPTTDDMVVRWLLREAQGGVCIYTSNEIRPADLPNLQIEHIVPRSRGGPDAFWNWVLCDENANAEKGDRVPYVWFKEEKTDEEWADYKRRVLARAAHLGRRKVDLLLRPDAAELAGEKYTAL

SEQ ID NO: 3648 - protein, 166 aa, unidentified
  REGION 1..166: note = Description of Unknown: uncultivated organism
  REGION 1..166: note = MG1-10 HNH domain
QAPRTETQKKEIEVEQKNNRASKDKMASEFGVGEGKLGRSKYFRIALWKQQGGSKTTKAICPFTGKTLDVDDPLSPQLELAHLYPDTKGGLYMMDNLVLTTREVNKAMDNMTPVEAARAGIFGISCDEMIRRSEQFAWGESKRKLFRFEPTAEESFPDFNNMTRIS

SEQ ID NO: 3649 - protein, 166 aa, unidentified
  REGION 1..166: note = Description of Unknown: uncultivated organism
  REGION 1..166: note = MG1-11 HNH domain
NPACNTKQASEIQKQNDARRKRKEELCRAYGCANPTHAEMLRLQLFEEQGGKRKGEAPAICPFTGESLGTDPLSPHLELAHIFPDARGGLYIRENLVLTTARTNRDMNNRTPIEAAEASLPGWSRWETIEQRIRHFRWNAKKLELFTFRPTPEQPIPDFNNMTRTA

SEQ ID NO: 3650 - protein, 161 aa, unidentified
  REGION 1..161: note = Description of Unknown: uncultivated organism
  REGION 1..161: note = MG1-12 HNH domain
DMPRNVVQAKEIQDEQKRRREFKEGLFEKFGVHDKQQDSEARKRVLLYDQQGGNRGEAICPYTGEPLGDPLSPKLQIDHIFPESLGGISEMVNLVLTHETTNNQRKGNQTPYQAFGGQQNTAEWQALVARVQKMGWNKQKRELVLREESSCPEWDNMTRIA

SEQ ID NO: 3651 - protein, 153 aa, unidentified; identical to SEQ ID NO: 3642
  REGION 1..153: note = Description of Unknown: uncultivated organism
  REGION 1..153: note = MG1-14 HNH domain

SEQ ID NO: 3652 - protein, 157 aa, unidentified
  REGION 1..157: note = Description of Unknown: uncultivated organism
  REGION 1..157: note = MG1-20 HNH domain
DFSTKDSKKKYENDSKTNNKLFLEAKKKLRDNFGIDYRKQNENLVRKYMMWEKQGHICPYTGQPLDFEKLPEYEIEHIIPRGNKWNGPDDIKNTVLTTSAENRRKGENMPFEYIKNEEWESFKNRVNNMNISGKTKNILLARTEEEVEKLINRYYGL

SEQ ID NO: 3653 - protein, 157 aa, unidentified; identical to SEQ ID NO: 3652
  REGION 1..157: note = Description of Unknown: uncultivated organism with predicted taxonomy: Candidatus Peregrinibacteria bacterium CG10_big_fil_rev_8_21_14_0_10_54_7
  REGION 1..157: note = MG1-21 HNH domain

SEQ ID NO: 3654 - protein, 157 aa, unidentified; identical to SEQ ID NO: 3652
  REGION 1..157: note = Description of Unknown: uncultivated organism with predicted taxonomy: Candidatus Peregrinibacteria bacterium CG10_big_fil_rev_8_21_14_0_10_54_7
  REGION 1..157: note = MG1-22 HNH domain

SEQ ID NO: 3655 - protein, 155 aa, unidentified
  REGION 1..155: note = Description of Unknown: uncultivated organism with predicted taxonomy: Candidatus Melainabacteria bacterium
  REGION 1..155: note = MG1-23 HNH domain
DNSLFGAKKANDTLKVMKENEKDNEQIVSELKDANALSSENILKLKLLKKQGLKCIYSGKSIAISNFDACEIDHIYPRSMGGNDALYNKVLCYSMENQKKAGRTPYEWLHKDEKTWFDFVNRLEAIKDTLGKKKYELLTSKPEDCKILIDSYNGL

SEQ ID NO: 3656 - protein, 155 aa, unidentified
  REGION 1..155: note = Description of Unknown: uncultivated organism
  REGION 1..155: note = MG1-24 HNH domain
DNSLFGKAKAQAAETNMREMEKRNQQLIEELKNYDAYSSKNFEKLKLLKIQCGQCAYSGEKIGIGDFNKCEIDHIYPRAMGGNDALYNKVLCYRVENQKKQDRTPYEWLSSNKEQWANYVFRLNKIKQSLGKKKFELLTSKPEDCAKLIDSYNGL

SEQ ID NO: 3657 - protein, 155 aa, unidentified
  REGION 1..155: note = Description of Unknown: uncultivated organism
  REGION 1..155: note = MG1-25 HNH domain
DNSLFGAKKTQEYISNINKNQKENEEIAQQLKDANCFSSKNLEKLKLLQKQGGHCIYSGRPIAISNLEECEIDHIYPRSRGGNDALSNKVLCYAIENQNKKEQTPYEWLHNNEHSWNEFVKRVTNKQEALGKIKVKLLISKPEDSEKLIKSYNGL

SEQ ID NO: 3658 - protein, 162 aa, unidentified
  REGION 1..162: note = Description of Unknown: uncultivated organism
  REGION 1..162: note = MG1-26 HNH domain
DNSLYGSKKAQDTEKYMKQQEKENEQIIKELKEAGLYVNGQNHANATYFLMHKLLKSQGGACAYSGQKIAPSNYDECEIDHIYPRTLGGNDALYNKVVCYRRENQDKKGRTPYEWLSSDNDKWANYVNRLNKIKKQLGKKKFELLTSKPEDCEKLIESYNGL

SEQ ID NO: 3659 - protein, 155 aa, unidentified
  REGION 1..155: note = Description of Unknown: uncultivated organism
  REGION 1..155: note = MG1-27 HNH domain
DNSLYGAKKAQDFLKTIKENEKTNNDLAIELKNADCFSVVNLEKLKLLKQQDGICIYCGQRIGISDLDKCEIDHIYPRSRGGNDAISNKVLCYSIENQKKKDRTPYEWLHNDERTWADFVNRAKLLKDKLKKTKYTLLTSKPENCEELIKSYNGL

SEQ ID NO: 3660 - protein, 155 aa, unidentified
  REGION 1..155: note = Description of Unknown: uncultivated organism
  REGION 1..155: note = MG1-28 HNH domain
DNSLFGKAKAQAAETNMKAMEKQNQQLVKELKNYDAYSSINFEKLKLLKMQCGQCAYSGQKIGISDFDKCEIDHIYPRTMGGNDALYNKVLCYRVENQKKQGRIPYEWLSSDKEKWANYVFRLNEIKKSLGKKKFELLTSKPEDCEKLIDSYNGL

SEQ ID NO: 3661 - protein, 155 aa, unidentified; identical to SEQ ID NO: 3656
  REGION 1..155: note = Description of Unknown: uncultivated organism
  REGION 1..155: note = MG1-29 HNH domain

SEQ ID NO: 3662 - protein, 155 aa, unidentified; identical to SEQ ID NO: 3660
  REGION 1..155: note = Description of Unknown: uncultivated organism
  REGION 1..155: note = MG1-30 HNH domain

SEQ ID NO: 3663 - protein, 155 aa, unidentified; identical to SEQ ID NO: 3659
  REGION 1..155: note = Description of Unknown: uncultivated organism
  REGION 1..155: note = MG1-31 HNH domain

SEQ ID NO: 3664 - protein, 155 aa, unidentified
  REGION 1..155: note = Description of Unknown: uncultivated organism
  REGION 1..155: note = MG1-32 HNH domain
DNSLYGAKKAQDFLKTIKENEKTNNDLAIELKNADCFSVVNLEKLKLLKQQDGICIYCGQRIGISDLDKCEIDHIYPRSRGGNDAISNKVLCYSIENQKKKDRTPYEWLHNDERTWADFVNRAKLLKDKLKKTKYTLLTSNPENCKELIKSYNGL

SEQ ID NO: 3665 - protein, 155 aa, unidentified; identical to SEQ ID NO: 3659
  REGION 1..155: note = Description of Unknown: uncultivated organism
  REGION 1..155: note = MG1-33 HNH domain

SEQ ID NO: 3666 - protein, 162 aa, unidentified; identical to SEQ ID NO: 3658
  REGION 1..162: note = Description of Unknown: uncultivated organism with predicted taxonomy: Candidatus Gastranaerophilales bacterium HUM_9
  REGION 1..162: note = MG1-34 HNH domain

SEQ ID NO: 3667 - protein, 155 aa, unidentified; identical to SEQ ID NO: 3657
  REGION 1..155: note = Description of Unknown: uncultivated organism
  REGION 1..155: note = MG1-35 HNH domain

SEQ ID NO: 3668 - protein, 157 aa, unidentified
  REGION 1..157: note = Description of Unknown: uncultivated organism with predicted taxonomy: Clostridium
  REGION 1..157: note = MG1-36 HNH domain
ELGKGKSEREKIKKQKQENLGKTSRIKEELQAQGIENPTGTEITKYKLWKEQTNYCMYSGKKIDIEQVFSSETQINYIIPFWMCFDDTYKNKILTFTSEVKQKQDLMPYQYIQKMRRDTEEYETRISMLIRVYSKKNRLVKKNITKEEMIKWRNRNI

SEQ ID NO: 3669 - protein, 155 aa, unidentified; identical to SEQ ID NO: 3657
  REGION 1..155: note = Description of Unknown: uncultivated organism
  REGION 1..155: note = MG1-37 HNH domain

SEQ ID NO: 3670 - protein, 155 aa, unidentified; identical to SEQ ID NO: 3655
  REGION 1..155: note = Description of Unknown: uncultivated organism with predicted taxonomy: Candidatus Melainabacteria bacterium
  REGION 1..155: note = MG1-38 HNH domain

SEQ ID NO: 3671 - protein, 155 aa, unidentified; identical to SEQ ID NO: 3659
  REGION 1..155: note = Description of Unknown: uncultivated organism
  REGION 1..155: note = MG1-39 HNH domain

SEQ ID NO: 3672 - protein, 155 aa, unidentified; identical to SEQ ID NO: 3664
  REGION 1..155: note = Description of Unknown: uncultivated organism
  REGION 1..155: note = MG1-40 HNH domain

SEQ ID NO: 3673 - protein, 162 aa, unidentified; identical to SEQ ID NO: 3658
  REGION 1..162: note = Description of Unknown: uncultivated organism with predicted taxonomy: Candidatus Gastranaerophilales bacterium HUM_9
  REGION 1..162: note = MG1-41 HNH domain

SEQ ID NO: 3674 - protein, 155 aa, unidentified; identical to SEQ ID NO: 3659
  REGION 1..155: note = Description of Unknown: uncultivated organism
  REGION 1..155: note = MG1-42 HNH domain

SEQ ID NO: 3675 - protein, 155 aa, unidentified; identical to SEQ ID NO: 3659
  REGION 1..155: note = Description of Unknown: uncultivated organism
  REGION 1..155: note = MG1-43 HNH domain

SEQ ID NO: 3676 - protein, 155 aa, unidentified; identical to SEQ ID NO: 3660
  REGION 1..155: note = Description of Unknown: uncultivated organism
  REGION 1..155: note = MG1-44 HNH domain

SEQ ID NO: 3677 - protein, 162 aa, unidentified; identical to SEQ ID NO: 3658
  REGION 1..162: note = Description of Unknown: uncultivated organism with predicted taxonomy: Candidatus Melainabacteria
  REGION 1..162: note = MG1-45 HNH domain

SEQ ID NO: 3678 - protein, 155 aa, unidentified; identical to SEQ ID NO: 3660
  REGION 1..155: note = Description of Unknown: uncultivated organism
  REGION 1..155: note = MG1-46 HNH domain

SEQ ID NO: 3679 - protein, 155 aa, unidentified; identical to SEQ ID NO: 3659
  REGION 1..155: note = Description of Unknown: uncultivated organism
  REGION 1..155: note = MG1-47 HNH domain

SEQ ID NO: 3680 - protein, 155 aa, unidentified
  REGION 1..155: note = Description of Unknown: uncultivated organism
  REGION 1..155: note = MG1-48 HNH domain
DNSLYGAKKANGYLKNIKENEKENNEIKKELEEANAYSPTNFEKLKLLRMQCGKCVYSGKNISINDFDSCEIDHVYPRTMGGNDALYNRVLCYSIENQNKAGRTPYEWLSSDKELWANYVARLNDIKGSLGKKKFELLTSKPEVCEKLIESYNGL

SEQ ID NO: 3681 - protein, 153 aa, unidentified
  REGION 1..153: note = Description of Unknown: uncultivated organism
  REGION 1..153: note = MG1-49 HNH domain
DNSLFGAEKAKATEQMMRINEKKNEEIRNNLSDDYSAINFLKYKLAEMQDWTCIYSGRKIEITDFDACEIDHIFPRTDDTNDALYNKVICYKEEIADKHGRTPYEWMNNNTARWQEYIMRVKSLSQKSGKTKTALLTLSPTQSEKFLEKRKAL

SEQ ID NO: 3682 - protein, 153 aa, unidentified; identical to SEQ ID NO: 3681
  REGION 1..153: note = Description of Unknown: uncultivated organism
  REGION 1..153: note = MG1-50 HNH domain

SEQ ID NO: 3683 - protein, 154 aa, unidentified
  REGION 1..154: note = Description of Unknown: uncultivated organism with predicted taxonomy: Candidatus Melainabacteria bacterium
  REGION 1..154: note = MG1-51 HNH domain
DNSLYGAQKANNYLISIKANEKENNEIKKELEDANAYSNTNFDKLKLLRMQGGRCIYSGEKIGISNFEQCDIDHIFPRSRGGNDALYNKVLCYSKENRIKGDKVPYEWLNNTENWDIYLQRTRDLKGSLGKKKFELLTSKPDQCEKLIESYNGL

SEQ ID NO: 3684 - protein, 155 aa, unidentified
  REGION 1..155: note = Description of Unknown: uncultivated organism
  REGION 1..155: note = MG1-52 HNH domain
DNSLYGAKKSNDYLKNIKENEKENLEIKKELEDVDRYSPTNFEKLKLLRMQGGKCIYSGKPICIDDFDKCEIDHIYPRTMGGNDALYNRVLCYSIENQNKKGRTPYEWLSNDKEYWSAYVDRLNKIKGSLGKKKFELLTSKPEDCEKLIESYNGL

SEQ ID NO: 3685 - protein, 153 aa, unidentified; identical to SEQ ID NO: 3681
  REGION 1..153: note = Description of Unknown: uncultivated organism
  REGION 1..153: note = MG1-53 HNH domain

SEQ ID NO: 3686 - protein, 153 aa, unidentified; identical to SEQ ID NO: 3681
  REGION 1..153: note = Description of Unknown: uncultivated organism
  REGION 1..153: note = MG1-54 HNH domain

SEQ ID NO: 3687 - protein, 153 aa, unidentified; identical to SEQ ID NO: 3681
  REGION 1..153: note = Description of Unknown: uncultivated organism
  REGION 1..153: note = MG1-55 HNH domain

SEQ ID NO: 3688 - protein, 155 aa, unidentified
  REGION 1..155: note = Description of Unknown: uncultivated organism
  REGION 1..155: note = MG1-56 HNH domain
DNSLEGQKRAKDTENYMKAQAKENEQIKKELEEQNALSGINFEKLKLLKMQGGKCIYSGQNIGISDFDKCEIDHIYPRTMGGNDALYNRVLCYRIENQDKKGRTPYEWLSHDEEQWAAYVHRLSEIKQILGKKKFELLTSKPEDCAKIIDSYNGL

SEQ ID NO: 3689 - protein, 153 aa, unidentified
  REGION 1..153: note = Description of Unknown: uncultivated organism
  REGION 1..153: note = MG1-57 HNH domain
DNSLFGAEKAKATEQMMKNNEKKNEEIKKNLGDDYSAINFLKYKLAEMQDWKCIYSGRKIGITDFAACEIDHIFPRTDDGNDALYNKVICYKEENADKLGRTPYEWLYHNIARWQEYVTRVKSLSQKLGKTKTALLTLPPEQSEKLLEKKNAL

SEQ ID NO: 3690 - protein, 185 aa, unidentified
  REGION 1..185: note = Description of Unknown: uncultivated organism with predicted taxonomy: Candidatus Termititenax aidoneus
  REGION 1..185: note = MG1-58 HNH domain
DNSVLSGAKAEGYKLLCEQNYAKNEKLKNDLGDDFSPQNLIKLKLLESQNFQCIYSGNNIAPTDLDACEIDHIYPRTMGGNDALYNKVLCYSIENQNKKGRTPYEWFHQEKTEEEWIEYKNRCFNFLNKYPIPKKVKRRQDNHISKSIKEYYVKLSEYKLAKKKFELLTSKPEDCEKLIESYNGL

SEQ ID NO: 3691 - protein, 158 aa, unidentified
  REGION 1..158: note = Description of Unknown: uncultivated organism with predicted taxonomy: Verrucomicrobia
  REGION 1..158: note = MG1-59 HNH domain
DDFLGKKAKSDLNKAIKTRFDEKKKLAEDLDSKREEFGFKYASKKMLLKFELYKKQGGECVYTGNALPLSELESLEIEHIVPRSRGGPDAMYNYVLTDEKTNKEKGDRTPFEWRSTMGAEWESYCERVRKLTKELGAKRCKLLLSPNAAELVEKYTAF

SEQ ID NO: 3692 - protein, 152 aa, unidentified
  REGION 1..152: note = Description of Unknown: uncultivated organism with predicted taxonomy: unclassified Verrucomicrobia (miscellaneous)
  REGION 1..152: note = MG1-60 HNH domain
DDFMGEKEKKEMRIAMKKRAEEKMRIAKDLDEHGFKGGNLLLKMELYRKQNGICLYTGDALPLSELATLEIEHIVPRSRGGPDAQYNYVITREKTNKLKGDKTPYEWLSSDAKEWASYTDRVNACAKALGKKRCRLLLEKDAEELVEKYTAL

SEQ ID NO: 3693 - protein, 150 aa, unidentified
  REGION 1..150: note = Description of Unknown: uncultivated organism
  REGION 1..150: note = MG1-61 HNH domain
EGFYGEKRRKEIIFEQNKKRKENDLAFEDAKKIGLKGKDAVLKIKLHKEQGGFDIYDGNPIKDNEIDNYEIDHIVPRESGGPDSYINKVLTSRKNNEEKGKRTPYEWLKDKNYWNDYVKRIKDSKTLNDKKKTLLTSSEAVNLAEKYTQL

SEQ ID NO: 3694 - protein, 150 aa, unidentified; identical to SEQ ID NO: 3693
  REGION 1..150: note = Description of Unknown: uncultivated organism with predicted taxonomy: Deltaproteobacteria
  REGION 1..150: note = MG1-62 HNH domain

SEQ ID NO: 3695 - protein, 160 aa, unidentified
  REGION 1..160: note = Description of Unknown: uncultivated organism with predicted taxonomy: Verrucomicrobia bacterium 61-8
  REGION 1..160: note = MG1-63 HNH domain
DDKDNSLEGRKRTEAIQQALRENEQRRDKARKALEQCGLPTTDDMVVRWLLLEAQGPACIYTNKPIRCTDLPNLQIEHIVPRALGGPDAFWNWVLSDENANAEKGDRVPYVWFKEEKTDEEWADYKRRVLARAAHLGRRKVDLLLRPDAAELAGEKYTAL

SEQ ID NO: 3696 - protein, 160 aa, unidentified
  REGION 1..160: note = Description of Unknown: uncultivated organism
  REGION 1..160: note = MG1-64 HNH domain
DDKDNSLEGRKRTEAIQQALRENEQRRDKARKALEQCGLPTTDDMVVRWLLREAQGGVCIYTSNEIRPADLPNLQIEHIVPRSRGGPDAFWNWVLCDENANAEKGDRVPYVWFKEEKTDEEWADYKRRVLARAAQLGRRKADLHLRPDAAELAGEKYTAL

SEQ ID NO: 3697 - protein, 175 aa, unidentified
  REGION 1..175: note = Description of Unknown: uncultivated organism with predicted taxonomy: Verrucomicrobia
  REGION 1..175: note = MG1-65 HNH domain
EDFLGEEAKKKIQKIQNENKKLNSQAAEKVEELKLAGRQSILKYKLWQLQGGICLYTGKPIAQTEIESHEVEHIVPRNHPQTQGPDAQWNLVLTAREINDRKANRTPFEWFQQDPIAFQWPMGQPDASIPSQEKQRLWEAYCDRIKQRKKNLGNKRVKLLLSDKAPELVERYETL

SEQ ID NO: 3698 - protein, 163 aa, unidentified
  REGION 1..163: note = Description of Unknown: uncultivated organism
  REGION 1..163: note = MG1-66 HNH domain
ETLDSKGRKERYKKVQDANRKAKEEAKKNLRELRNNGISIDGENALLKVRLWQEQNGRDLYTGLPIGQTEISICEIDHIIPREMGGPNAMYNFVLTKPECNREKGKRTPYQWLGSDPEKWQMFVDRINSEEYKKLSDRKKELLLKTITDEDELKELVEKYTHL

SEQ ID NO: 3699 - protein, 160 aa, unidentified
  REGION 1..160: note = Description of Unknown: uncultivated organism
  REGION 1..160: note = MG1-67 HNH domain
DDKDNSLEGRKRTEAIQQALRENEQRRDKARKALEQCGLPTTDDMVVRWLLLEAQGPACIYTNKPIRCTDLPNLQIEHIVPRSFGGPDAFWNWVLCDENANAEKGDRVPYVWFKEEKTDEEWADYKRRVLARAAQLGRRKVDLLLRPDAAELAGEKYTAL

SEQ ID NO: 3700 - protein, 150 aa, unidentified
  REGION 1..150: note = Description of Unknown: uncultivated organism with predicted taxonomy: Elusimicrobia bacterium HGW-Elusimicrobia-1
  REGION 1..150: note = MG1-68 HNH domain
DGFYGKIKKKKIIAEQNKNRKESDLAFKEAQTLGLKGGESILKIKLYREQGGFDLYDGKTIKDTEIDNYEIDHIVPREDGGPDSYINKVLTSRKNNDDKGKRTPYEWLSKSDNWEEYFERVKKLPKDSKKKKDLLVSANAKELVEKYTQL

SEQ ID NO: 3701 - protein, 168 aa, unidentified
  REGION 1..168: note = Description of Unknown: uncultivated organism with predicted taxonomy: Pedosphaera sp. Tous-C6FEB
  REGION 1..168: note = MG1-69 HNH domain
EDFMGEEAKRRLQTFQRQREEERKKARSIAAQAGAESALSALKCQLWEAQGGECLNGREVLDQTGQSKARCLYRQTALPLSRLDEYVIDHIVPRARGGPEAMVNYVLTTAETNEAKGDRTPFEWLHGSPDWDAYVARVKARAAALRNKKVQLLTREDAPELVERYTAL

SEQ ID NO: 3702 - protein, 158 aa, unidentified
  REGION 1..158: note = Description of Unknown: uncultivated organism with predicted taxonomy: Endomicrobium
  REGION 1..158: note = MG1-70 HNH domain
ETLETSKRKDYKKIQKFNLKAKEKAKQILEELRSKGISMQGSNKVLKVRLWQEQGGFDVYTGQPIGETEIDICEIDHIVPREMGGPNARYNMVLTKPECNREKGKRTPYQWLGQDPEEWQKFVERLEREKGFENLPAKKKNLLVATNPEELIERYTHL

SEQ ID NO: 3703 - protein, 175 aa, unidentified; identical to SEQ ID NO: 3697
  REGION 1..175: note = Description of Unknown: uncultivated organism
  REGION 1..175: note = MG1-71 HNH domain

SEQ ID NO: 3704 - protein, 153 aa, unidentified
  REGION 1..153: note = Description of Unknown: uncultivated organism with predicted taxonomy: Deltaproteobacteria
  REGION 1..153: note = MG1-72 HNH domain
EDFMGEQAKRELQTFQKRREQARAEAEAEAAKLGLESRSSSLRYELFKAQGGICLYTGRTLSETQLDQYEIDHIVPRSLGGPDAMVNYVLTFPEVNSAKEKGKLTPYALLHGTDGWDAYVARVKARAAALRNKKVQLLTREDAPQLVERYTAL

SEQ ID NO: 3705 - protein, 160 aa, unidentified; identical to SEQ ID NO: 3647
  REGION 1..160: note = Description of Unknown: uncultivated organism with predicted taxonomy: Pedosphaera sp. Tous-C6FEB
  REGION 1..160: note = MG1-73 HNH domain

SEQ ID NO: 3706 - protein, 175 aa, unidentified; identical to SEQ ID NO: 3697
  REGION 1..175: note = Description of Unknown: uncultivated organism
  REGION 1..175: note = MG1-74 HNH domain

SEQ ID NO: 3707 - protein, 153 aa, unidentified
  REGION 1..153: note = Description of Unknown: uncultivated organism
  REGION 1..153: note = MG1-75 HNH domain
DIPRNEKERREKEQEIRKNQGRKEKLFERFNAADSAVGSAYKRVLLFDQQRGLCPYSGGELGDPLSSDLEIDHIFPRKRGGISVRENLVLTFADRNRDKGNLTPREAARKRNGWDWDEIEAATARMKWSRKKREIFEREGAGIPPLANVTRTA

SEQ ID NO: 3708 - protein, 156 aa, unidentified
  REGION 1..156: note = Description of Unknown: uncultivated organism
  REGION 1..156: note = MG1-76 HNH domain
ELLAGEERKKKYLKLQKENRQKKEKAEKIYQELKNGNVNLKGRSILLKIQLWQEQNGIDPYSGEQIPQTKINLYEIDHIVPREMGGSDAYFNKVLTSPEKNREKAKRTPYQMFKGNISDWKKYLNTIEKITNLSKKKRALLTSENPEELIERYTHL

SEQ ID NO: 3709 - protein, 137 aa, unidentified
  REGION 1..137: note = Description of Unknown: uncultivated organism
  REGION 1..137: note = MG1-77 HNH domain
EDFMGEQAKRDLQSFQKRREQARAEAEAEAAKLGLGSRSRALRYELFKAQGGICLYTGRPLSETQLDQYEIDHIVPRSLGGPDAMVNYVLTFPEVNSAKEKGKLTPYALLHGTPHWDAYVARVKARAATLRNKKVQL

SEQ ID NO: 3710 - protein, 151 aa, unidentified
  REGION 1..151: note = Description of Unknown: uncultivated organism with predicted taxonomy: Verrucomicrobia
  REGION 1..151: note = MG1-78 HNH domain
EDFMGRKAKQEYLKFQRERAKERSEAREEAAKAGATEGAAGLKMELYKAQGGICLYTGEALSVTSLDEYVIDHIVPRAKGGPDSVMNYVLTTRRANDDKLDRTPYEWLSQTPGWDAYVERVKERAVTLRNKKVSLLTRPDADTLVDKYTAL

SEQ ID NO: 3711 - protein, 157 aa, unidentified
  REGION 1..157: note = Description of Unknown: uncultivated organism
  REGION 1..157: note = MG1-79 HNH domain
EIPKNQKEKKEFQDEIKANRSRKTDIIEKKYGLKLDSLSDWQVKQVLLFDQQANEEGEAFSPYSGVSLGTNPLAHDLEVEHIYPERRGGISVMDNLVITWRTENQTKGDRTPWEWAKDEGWRVDVHLQKMHWSANKRALFVRQESDPPQWDNTTRMA

SEQ ID NO: 3712 - protein, 151 aa, unidentified
  REGION 1..151: note = Description of Unknown: uncultivated organism with predicted taxonomy: Verrucomicrobia
  REGION 1..151: note = MG1-80 HNH domain
EDFMGRKAKQEYLKFQRERAKERSEAREEAAKAGATEGAAGLKMELYKAQGGICLYTGEALSVTSLDEYVIDHIVPRAKGGPDSVMNYVLTTRRANDDKLDRMPYEWLSQTPGWDAYVERVKERAVTLRNKKVSLLTRPDADTLVDKYTAL

SEQ ID NO: 3713 - protein, 152 aa, unidentified
  REGION 1..152: note = Description of Unknown: uncultivated organism
  REGION 1..152: note = MG1-81 HNH domain
SLALGEKNKRELLKRNKANRDQRESIRQELASRNASTSRNAILRYRLWKEALSTCPFCGDKITQEQLLRGEADIEHLVPRSVVDCNEFYNLTVGHVRCNRELKGDRTPFQAFGHTEKWPQLRDNAEKCFKGRKLEIFLSDNAEQLIEQKADL

SEQ ID NO: 3714 - protein, 151 aa, unidentified
  REGION 1..151: note = Description of Unknown: uncultivated organism
  REGION 1..151: note = MG1-82 HNH domain
EDFMGEEAKRRLRSFQRQREAERKRAREETAEAGATEKSAPLKYELLTAQGGLCLYCGQALTLKKLEQYAIDHIVPVGAQGSDALFNKVLAHQECNAAKGKQTPFEWLHGTPGWDAYVARVKARAATLRNKKVQLLTREDAPELVERYTAL

SEQ ID NO: 3715 - protein, 154 aa, unidentified
  REGION 1..154: note = Description of Unknown: uncultivated organism
  REGION 1..154: note = MG1-83 HNH domain
DIPRNQKEKKEFKDEIKANRSRKTDIIEKKYNLKLDSLSDWQVKQVLLFDQQANDDGEAFSPYTGASLGKNPLAHGLEVEHIYPERRGGISIMDNLVITWRTENQTKGDQTPWEWLGQRATAQLQKMHWNRDKRALFVREESEPPQWDNTTRMA

SEQ ID NO: 3716 - protein, 152 aa, unidentified
  REGION 1..152: note = Description of Unknown: uncultivated organism with predicted taxonomy: Coraliomargarita sp. CAG:312
  REGION 1..152: note = MG1-84 HNH domain
EDFMGKQAKKDLSLSMKKRFEEKIDIAKKLDDIGYKGNKMLLKMELLQKQGFACLYTGEALQETDLPILEIEHIVPRSLGGPDAAYNYVLTSESTNKAKGNQTPYKWLSPDRDKWRAYTERVRARAAELGSKRCRLLLSENAEELINKYTAL

SEQ ID NO: 3717 - protein, 152 aa, unidentified; identical to SEQ ID NO: 3692
  REGION 1..152: note = Description of Unknown: uncultivated organism with predicted taxonomy: unclassified Verrucomicrobia (miscellaneous)
  REGION 1..152: note = MG1-85 HNH domain

SEQ ID NO: 3718 - protein, 152 aa, unidentified
  REGION 1..152: note = Description of Unknown: uncultivated organism with predicted taxonomy: Coraliomargarita sp. CAG:312
  REGION 1..152: note = MG1-86 HNH domain
EDFMGKQAKKDLSLSMKKRFEEKIDIAKKLDDIGYKGNKMLLKMELLQKQGFACLYTGEALQETDLPVLEIEHIVPRSLGGPDAAYNYVLTSESTNKAKGNQTPYKWLSPDRDKWRAYTERVRARAAELGSKRCRLLLSENAEELINKYTAL

SEQ ID NO: 3719 - protein, 158 aa, unidentified
  REGION 1..158: note = Description of Unknown: uncultivated organism with predicted taxonomy: Verrucomicrobia
  REGION 1..158: note = MG1-87 HNH domain
DDFLGKKAKSDLNKAIKTRFDEKKKLAEDLDSKREEFGFKYASKKMLLKFELYKKQGGECVYTGNALPLSELESLEIEHIVPRSRGGPDAMYNYVLTDEKTNKEKGDRTPFEWRSTMGAEWESYCERVRKLTKELGAKRCKLLLSPNAAELVEKYTAL

SEQ ID NO: 3720 - protein, 152 aa, unidentified; identical to SEQ ID NO: 3692
  REGION 1..152: note = Description of Unknown: uncultivated organism with predicted taxonomy: unclassified Verrucomicrobia (miscellaneous)
  REGION 1..152: note = MG1-88 HNH domain

SEQ ID NO: 3721 - protein, 152 aa, unidentified; identical to SEQ ID NO: 3692
  REGION 1..152: note = Description of Unknown: uncultivated organism with predicted taxonomy: unclassified Verrucomicrobia (miscellaneous)
  REGION 1..152: note = MG1-89 HNH domain

SEQ ID NO: 3722 - protein, 152 aa, unidentified; identical to SEQ ID NO: 3692
  REGION 1..152: note = Description of Unknown: uncultivated organism with predicted taxonomy: unclassified Verrucomicrobia (miscellaneous)
  REGION 1..152: note = MG1-90 HNH domain

SEQ ID NO: 3723 - protein, 158 aa, unidentified
  REGION 1..158: note = Description of Unknown: uncultivated organism
  REGION 1..158: note = MG1-91 HNH domain
DDFLGKKAKADLSKAINDRAKEKKKYAEELDSQRENFGPKYASKKMLLKYELYSKQKGECIYTGRALGFSDLEQLEVEHIVPRSRGGPDALYNYVLTDEKTNKDKGDRTPFEWLSSKGVEWDAYRDRVRGLTKELGAKRCKLLLSPNAEELVEKYTAL

SEQ ID NO: 3724 - protein, 152 aa, unidentified; identical to SEQ ID NO: 3641
  REGION 1..152: note = Description of Unknown: uncultivated organism with predicted taxonomy: unclassified Verrucomicrobia (miscellaneous)
  REGION 1..152: note = MG1-92 HNH domain

SEQ ID NO: 3725 - protein, 152 aa, unidentified; identical to SEQ ID NO: 3692
  REGION 1..152: note = Description of Unknown: uncultivated organism with predicted taxonomy: unclassified Verrucomicrobia (miscellaneous)
  REGION 1..152: note = MG1-93 HNH domain

SEQ ID NO: 3726 - protein, 158 aa, unidentified
  REGION 1..158: note = Description of Unknown: uncultivated organism with predicted taxonomy: unclassified Verrucomicrobia (miscellaneous)
  REGION 1..158: note = MG1-94 HNH domain
DDFLGSKAKKEMSQGIKKRFEEKKKLAEELDSQRAEFGNKYASKKMLLKFELYKKQRGRCVYTDNALPLSELENLEVEHIFPRSRGGADAMYNYVLTDENTNKQKGDRTPFEWLSSDKTKWESYCDRVRSLTQSLGAKRCKLLVSPNAEELMQKYTAL

SEQ ID NO: 3727 - protein, 152 aa, unidentified
  REGION 1..152: note = Description of Unknown: uncultivated organism with predicted taxonomy: Coraliomargarita sp. CAG:312
  REGION 1..152: note = MG1-95 HNH domain
EDFMGKQAKKDLSLSMKKRFEEKIDIAKKLDDIGYKGNKMLLKMELLQKQGFACLYTGEALQETDLPILEIEHIVPRSLGGPDAAYNYVLTSESTNKAKGNQTPYKWLSPDRDKWRAYTERVRARATELGSKRCRLLLSENAEELINKYTAL

SEQ ID NO: 3728 - protein, 152 aa, unidentified; identical to SEQ ID NO: 3692
  REGION 1..152: note = Description of Unknown: uncultivated organism with predicted taxonomy: unclassified Verrucomicrobia (miscellaneous)
  REGION 1..152: note = MG1-96 HNH domain

SEQ ID NO: 3729 - protein, 152 aa, unidentified; identical to SEQ ID NO: 3692
  REGION 1..152: note = Description of Unknown: uncultivated organism with predicted taxonomy: unclassified Verrucomicrobia (miscellaneous)
  REGION 1..152: note = MG1-97 HNH domain

SEQ ID NO: 3730 - protein, 152 aa, unidentified; identical to SEQ ID NO: 3692
  REGION 1..152: note = Description of Unknown: uncultivated organism with predicted taxonomy: unclassified Verrucomicrobia (miscellaneous)
  REGION 1..152: note = MG1-98 HNH domain

SEQ ID NO: 3731 - protein, 152 aa, unidentified; identical to SEQ ID NO: 3692
  REGION 1..152: note = Description of Unknown: uncultivated organism with predicted taxonomy: unclassified Verrucomicrobia (miscellaneous)
  REGION 1..152: note = MG1-99 HNH domain

SEQ ID NO: 3732 - protein, 152 aa, unidentified; identical to SEQ ID NO: 3716
  REGION 1..152: note = Description of Unknown: uncultivated organism with predicted taxonomy: Coraliomargarita sp. CAG:312
  REGION 1..152: note = MG1-100 HNH domain

SEQ ID NO: 3733 - protein, 152 aa, unidentified
  REGION 1..152: note = Description of Unknown: uncultivated organism with predicted taxonomy: unclassified Verrucomicrobia (miscellaneous)
  REGION 1..152: note = MG1-101 HNH domain
DDFLGEKAKKEYQKAINERFKEKQELAKEMDEAGYKGAKMLLKLELYKKQGGQCVYTGEALPSSEIASLEIEHIVPRSRGGPDSIYNYVLTRESTNKEKADMTPYEWLSRNADRWNAYVSRVNSLYKSLGGKRCKLLLANNAEELVDKYTAL

SEQ ID NO: 3734 - protein, 152 aa, unidentified
  REGION 1..152: note = Description of Unknown: uncultivated organism with predicted taxonomy: unclassified Verrucomicrobia (miscellaneous)
  REGION 1..152: note = MG1-102 HNH domain
DDFMGEKEKKEMRIAMKKRAEEKMRIAKDLDGHGFKGGNLLLKMELYRKQNGICLYTGDALPLSELATLEIEHIVPRSRGGPDAQYNYVITREKTNKLKGDKTPYEWLSSDAKEWASYTDRVNACAKALGKKRCRLLLEKDAEELVEKYAAL

SEQ ID NO: 3735 - protein, 152 aa, unidentified; identical to SEQ ID NO: 3692
  REGION 1..152: note = Description of Unknown: uncultivated organism with predicted taxonomy: Verrucomicrobia
  REGION 1..152: note = MG1-103 HNH domain

SEQ ID NO: 3736 - protein, 152 aa, unidentified; identical to SEQ ID NO: 3716
  REGION 1..152: note = Description of Unknown: uncultivated organism with predicted taxonomy: Verrucomicrobia
  REGION 1..152: note = MG1-104 HNH domain

SEQ ID NO: 3737 - protein, 152 aa, unidentified; identical to SEQ ID NO: 3692
  REGION 1..152: note = Description of Unknown: uncultivated organism
  REGION 1..152: note = MG1-105 HNH domain

SEQ ID NO: 3738 - protein, 158 aa, unidentified
  REGION 1..158: note = Description of Unknown: uncultivated organism with predicted taxonomy: Verrucomicrobia
  REGION 1..158: note = MG1-106 HNH domain
DDFLGKKAKSDLNKAIKTRFDEKKKLAEDLDSKREEFGLKYASKKMLLKFELYKKQGGECVYTGNALPLSELENLEVEHIVPRSRGGPDAMYNYVLTDEKTNKEKGDRTPYEWLSSKGAEWDSYCDRVRELTKNLGAKRCRLLLAPNAAELVEKYTAL

SEQ ID NO: 3739 - protein, 158 aa, unidentified; identical to SEQ ID NO: 3719
  REGION 1..158: note = Description of Unknown: uncultivated organism with predicted taxonomy: Verrucomicrobia
  REGION 1..158: note = MG1-107 HNH domain

SEQ ID NO: 3740 - protein, 158 aa, unidentified
  REGION 1..158: note = Description of Unknown: uncultivated organism with predicted taxonomy: Verrucomicrobia
  REGION 1..158: note = MG1-108 HNH domain
DDFLGKKAKSDLNKAIKTRFDEKKKLAEDLDSKREEFGLKYASKKMLLKFELYKKQGGECVYTGNALPLSELENLEVEHIVPRSRGGPDAMYNYVLTDEKTNKEKGDRTPYEWHSLKGAEWDSYCDRVRELTKNLGAKRCRLLLAPNAAELVEKYTAL

SEQ ID NO: 3741 - protein, 152 aa, unidentified
  REGION 1..152: note = Description of Unknown: uncultivated organism with predicted taxonomy: unclassified Verrucomicrobia (miscellaneous)
  REGION 1..152: note = MG1-109 HNH domain
DDFMGEKEKKEMRSAMKKRAEEKMRIAKDLDEHGFKGGNLLLKMELYRKQNGICLYTGDALPLSELATLEIEHIVPRSRGGPDAQYNYVITREKTNKLKGDKTPYEWLSSDAKEWASYTDRVNACAKALGKKRCRLLLEKDAEELVEKYTAL

SEQ ID NO: 3742 - protein, 158 aa, unidentified
  REGION 1..158: note = Description of Unknown: uncultivated organism with predicted taxonomy: Verrucomicrobia
  REGION 1..158: note = MG1-110 HNH domain
DDFLGKKAKSDLNKAIKTRFDEKKKLAEDLDSKREEFGFKYASKKMLLKFELYKKQGGECVYTGKALPLSELESLEIEHIVPRSRGGPDAMYNYVLTDEKTNKEKGDRTPFEWRSTMGAEWESYCERVRKLTKELGAKRCKLLLSPNAAELVEKYTAL

SEQ ID NO: 3743 - protein, 152 aa, unidentified; identical to SEQ ID NO: 3716
  REGION 1..152: note = Description of Unknown: uncultivated organism with predicted taxonomy: Coraliomargarita sp. CAG:312
  REGION 1..152: note = MG1-111 HNH domain

SEQ ID NO: 3744 - protein, 152 aa, unidentified; identical to SEQ ID NO: 3692
  REGION 1..152: note = Description of Unknown: uncultivated organism with predicted taxonomy: unclassified Verrucomicrobia (miscellaneous)
  REGION 1..152: note = MG1-112 HNH domain

SEQ ID NO: 3745 - protein, 152 aa, unidentified
  REGION 1..152: note = Description of Unknown: uncultivated organism with predicted taxonomy: Verrucomicrobia
  REGION 1..152: note = MG1-113 HNH domain
EDFMGKEQKKRMQIGMKKRASEKMLIAKKLDEAGYKGGNLLLKMELLEKQGGICLYTGEPLLPSELGVLEIEHIVPRSRGGPDAQYNYALTREKTNKEKADRTPFEWLSSDPVKWAGYSDRIKARAGQLGRKRCELLLEKNAEELVEKYTAL

SEQ ID NO: 3746 - protein, 152 aa, unidentified; identical to SEQ ID NO: 3641
  REGION 1..152: note = Description of Unknown: uncultivated organism with predicted taxonomy: unclassified Verrucomicrobia (miscellaneous)
  REGION 1..152: note = MG1-114 HNH domain

SEQ ID NO: 3747 - protein, 152 aa, unidentified; identical to SEQ ID NO: 3641
  REGION 1..152: note = Description of Unknown: uncultivated organism with predicted taxonomy: unclassified Verrucomicrobia (miscellaneous)
  REGION 1..152: note = MG1-115 HNH domain

SEQ ID NO: 3748 - protein, 158 aa, unidentified; identical to SEQ ID NO: 3719
  REGION 1..158: note = Description of Unknown: uncultivated organism with predicted taxonomy: Verrucomicrobia
  REGION 1..158: note = MG1-116 HNH domain

SEQ ID NO: 3749 - protein, 152 aa, unidentified; identical to SEQ ID NO: 3716
  REGION 1..152: note = Description of Unknown: uncultivated organism with predicted taxonomy: Coraliomargarita sp. CAG:312
  REGION 1..152: note = MG1-117 HNH domain

SEQ ID NO: 3750 - protein, 152 aa, unidentified; identical to SEQ ID NO: 3692
  REGION 1..152: note = Description of Unknown: uncultivated organism with predicted taxonomy: unclassified Verrucomicrobia (miscellaneous)
  REGION 1..152: note = MG1-118 HNH domain

SEQ ID NO: 3751 - protein, 152 aa, unidentified; identical to SEQ ID NO: 3692
  REGION 1..152: note = Description of Unknown: uncultivated organism with predicted taxonomy: unclassified Verrucomicrobia (miscellaneous)
  REGION 1..152: note = MG1-119 HNH domain

SEQ ID NO: 3752 - protein, 152 aa, unidentified
  REGION 1..152: note = Description of Unknown: uncultivated organism with predicted taxonomy: unclassified Verrucomicrobia (miscellaneous)
  REGION 1..152: note = MG1-120 HNH domain
EDFMGKEQKKRMQIEMKKRASEKMLIAKKLDEAGYKGGNLLLKMELLEKQGGICLYTGEPLLPSELGVLEIEHIVPRSRGGPDAQYNYALTREKTNKEKADRTPFEWLSSDPVKWAGYSDRVKARAGQLGRKRCELLLEKNAEELVEKYTAL

SEQ ID NO: 3753 - protein, 152 aa, unidentified; identical to SEQ ID NO: 3692
  REGION 1..152: note = Description of Unknown: uncultivated organism with predicted taxonomy: unclassified Verrucomicrobia (miscellaneous)
  REGION 1..152: note = MG1-121 HNH domain

SEQ ID NO: 3754 - protein, 152 aa, unidentified; identical to SEQ ID NO: 3692
  REGION 1..152: note = Description of Unknown: uncultivated organism with predicted taxonomy: unclassified Verrucomicrobia (miscellaneous)
  REGION 1..152: note = MG1-122 HNH domain

SEQ ID NO: 3755 - protein, 152 aa, unidentified; identical to SEQ ID NO: 3692
  REGION 1..152: note = Description of Unknown: uncultivated organism with predicted taxonomy: unclassified Verrucomicrobia (miscellaneous)
  REGION 1..152: note = MG1-123 HNH domain

SEQ ID NO: 3756 - protein, 158 aa, unidentified; identical to SEQ ID NO: 3719
  REGION 1..158: note = Description of Unknown: uncultivated organism with predicted taxonomy: Verrucomicrobia
  REGION 1..158: note = MG1-124 HNH domain

SEQ ID NO: 3757 - protein, 152 aa, unidentified; identical to SEQ ID NO: 3716
  REGION 1..152: note = Description of Unknown: uncultivated organism with predicted taxonomy: Verrucomicrobia
  REGION 1..152: note = MG1-125 HNH domain

SEQ ID NO: 3758 - protein, 152 aa, unidentified; identical to SEQ ID NO: 3692
  REGION 1..152: note = Description of Unknown: uncultivated organism with predicted taxonomy: unclassified Verrucomicrobia (miscellaneous)
  REGION 1..152: note = MG1-126 HNH domain

SEQ ID NO: 3759 - protein, 158 aa, unidentified; identical to SEQ ID NO: 3738
  REGION 1..158: note = Description of Unknown: uncultivated organism with predicted taxonomy: Verrucomicrobia
  REGION 1..158: note = MG1-127 HNH domain

SEQ ID NO: 3760 - protein, 152 aa, unidentified; identical to SEQ ID NO: 3692
  REGION 1..152: note = Description of Unknown: uncultivated organism with predicted taxonomy: unclassified Verrucomicrobia (miscellaneous)
  REGION 1..152: note = MG1-128 HNH domain

SEQ ID NO: 3761 - protein, 158 aa, unidentified; identical to SEQ ID NO: 3719
  REGION 1..158: note = Description of Unknown: uncultivated organism with predicted taxonomy: Verrucomicrobia
  REGION 1..158: note = MG1-129 HNH domain

SEQ ID NO: 3762 - protein, 152 aa, unidentified; identical to SEQ ID NO: 3692
  REGION 1..152: note = Description of Unknown: uncultivated organism with predicted taxonomy: unclassified Verrucomicrobia (miscellaneous)
  REGION 1..152: note = MG1-130 HNH domain

SEQ ID NO: 3763 - protein, 152 aa, unidentified; identical to SEQ ID NO: 3641
  REGION 1..152: note = Description of Unknown: uncultivated organism with predicted taxonomy: unclassified Verrucomicrobia (miscellaneous)
  REGION 1..152: note = MG1-131 HNH domain

SEQ ID NO: 3764 - protein, 152 aa, unidentified
  REGION 1..152: note = Description of Unknown: uncultivated organism with predicted taxonomy: unclassified Verrucomicrobia (miscellaneous)
  REGION 1..152: note = MG1-132 HNH domain
DDFMGEKEKKEMRIAMKKRAEEKMRIAKDLDEHGFKGGNLLLKMELYRKQNGICLYTGDALPLSELATLEIEHIVPRSRGGPDAQYNYVITREKTNKLKGDKTPYEWISSDAKEWASYTDRVNACAKALGKKRCRLLLEKDAEELVEKYTAL

SEQ ID NO: 3765 - protein, 152 aa, unidentified; identical to SEQ ID NO: 3716
  REGION 1..152: note = Description of Unknown: uncultivated organism with predicted taxonomy: Coraliomargarita sp. CAG:312
  REGION 1..152: note = MG1-133 HNH domain

SEQ ID NO: 3766 - protein, 152 aa, unidentified; identical to SEQ ID NO: 3641
  REGION 1..152: note = Description of Unknown: uncultivated organism with predicted taxonomy: unclassified Verrucomicrobia (miscellaneous)
  REGION 1..152: note = MG1-134 HNH domain

SEQ ID NO: 3767 - protein, 152 aa, unidentified; identical to SEQ ID NO: 3692
  REGION 1..152: note = Description of Unknown: uncultivated organism with predicted taxonomy: unclassified Verrucomicrobia (miscellaneous)
  REGION 1..152: note = MG1-135 HNH domain

SEQ ID NO: 3768 - protein, 158 aa, unidentified; identical to SEQ ID NO: 3719
  REGION 1..158: note = Description of Unknown: uncultivated organism with predicted taxonomy: Verrucomicrobia
  REGION 1..158: note = MG1-136 HNH domain

SEQ ID NO: 3769 - protein, 152 aa, unidentified; identical to SEQ ID NO: 3692
  REGION 1..152: note = Description of Unknown: uncultivated organism with predicted taxonomy: unclassified Verrucomicrobia (miscellaneous)
  REGION 1..152: note = MG1-137 HNH domain

SEQ ID NO: 3770 - protein, 152 aa, unidentified; identical to SEQ ID NO: 3692
  REGION 1..152: note = Description of Unknown: uncultivated organism with predicted taxonomy: unclassified Verrucomicrobia (miscellaneous)
  REGION 1..152: note = MG1-138 HNH domain

SEQ ID NO: 3771 - protein, 152 aa, unidentified; identical to SEQ ID NO: 3692
  REGION 1..152: note = Description of Unknown: uncultivated organism with predicted taxonomy: unclassified Verrucomicrobia (miscellaneous)
  REGION 1..152: note = MG1-139 HNH domain

SEQ ID NO: 3772 - protein, 152 aa, unidentified; identical to SEQ ID NO: 3692
  REGION 1..152: note = Description of Unknown: uncultivated organism with predicted taxonomy: unclassified Verrucomicrobia (miscellaneous)
  REGION 1..152: note = MG1-140 HNH domain

SEQ ID NO: 3773 - protein, 158 aa, unidentified
  REGION 1..158: note = Description of Unknown: uncultivated organism with predicted taxonomy: Verrucomicrobia
  REGION 1..158: note = MG1-141 HNH domain
DDFLGKKAKSDLNKAIKTRFDEKKKLAEELDSNRAEFGPKYASKKMLLKYELYKKQGGKCVYTGNALPLSELENLEIEHIVPRSRGGPDAMYNYVLTDEKTNKEKGDRTPFEWRSTMGAEWESYCARVRELTKKLGAKRCKLLLAPNAAELVEKYTAL

SEQ ID NO: 3774 - protein, 152 aa, unidentified
  REGION 1..152: note = Description of Unknown: uncultivated organism with predicted taxonomy: unclassified Verrucomicrobia (miscellaneous)
  REGION 1..152: note = MG1-142 HNH domain
EDFMGKEQKKRMQIEMKKRASEKMLIAKKLDEAGYKGGNLLLKMELFEKQGGVCLYTGEPLLPSELGILEIEHIVPRSRGGPDAQYNYVLTREKTNKEKADRTPFEWLSSDPVRWAGYSDRVKARAGQLGRKRCELLLEKNAEELVEKYTAL

SEQ ID NO: 3775 - protein, 152 aa, unidentified
  REGION 1..152: note = Description of Unknown: uncultivated organism with predicted taxonomy: Verrucomicrobia bacterium
  REGION 1..152: note = MG1-143 HNH domain
EDFMGKEQKKRMQIEMKKRASEKMLIAKKLDEAGYKGGNLLMKMELLEKQGGICLYTGEPLLPSELGVLEIEHIVPRSRGGPDAQYNYVLTREKTNKEKADRTPFEWLSSDPVKWAGYSDRVKARAGQLGRKRCELLLEKNAEELVEKYTAL

SEQ ID NO: 3776 - protein, 152 aa, unidentified; identical to SEQ ID NO: 3641
  REGION 1..152: note = Description of Unknown: uncultivated organism with predicted taxonomy: unclassified Verrucomicrobia (miscellaneous)
  REGION 1..152: note = MG1-144 HNH domain

SEQ ID NO: 3777 - protein, 158 aa, unidentified
  REGION 1..158: note = Description of Unknown: uncultivated organism with predicted taxonomy: Verrucomicrobia
  REGION 1..158: note = MG1-145 HNH domain
DDFLGKKAKSDLNKAIKTRFDEKKKLAEELDSNRAEFGPKYASKKMLLKYELYKKQGGKCVYTGKALPLSELENLEIEHIVPRSRGGPDAMYNYVLTDEKTNKEKGDRTPFEWRSTMGAEWESYCERVRKLTKELGAKRCKLLLSPNAAELVEKYTAL

SEQ ID NO: 3778 - protein, 152 aa, unidentified; identical to SEQ ID NO: 3692
  REGION 1..152: note = Description of Unknown: uncultivated organism with predicted taxonomy: unclassified Verrucomicrobia (miscellaneous)
  REGION 1..152: note = MG1-147 HNH domain

SEQ ID NO: 3779 - protein, 152 aa, unidentified; identical to SEQ ID NO: 3692
  REGION 1..152: note = Description of Unknown: uncultivated organism with predicted taxonomy: unclassified Verrucomicrobia (miscellaneous)
  REGION 1..152: note = MG1-148 HNH domain

SEQ ID NO: 3780 - protein, 152 aa, unidentified
  REGION 1..152: note = Description of Unknown: uncultivated organism with predicted taxonomy: unclassified Verrucomicrobia (miscellaneous)
  REGION 1..152: note = MG1-149 HNH domain
DDFMGEKEKKEMRIAMKKRAEEKMRIAKDLDEHGFKGGNLLLKMELYRKQNGICLYTGDALPLSELATLEIEHIVPRSRGGPDAQYNYVITREKTNKLKGDKTPYEWISSDAKEWASYTDRVTACAKALGKKRCRLLLEKDAEELVEKYTAL

SEQ ID NO: 3781 - protein, 152 aa, unidentified; identical to SEQ ID NO: 3716
  REGION 1..152: note = Description of Unknown: uncultivated organism with predicted taxonomy: Coraliomargarita sp. CAG:312
  REGION 1..152: note = MG1-150 HNH domain

SEQ ID NO: 3782 - protein, 152 aa, unidentified
  REGION 1..152: note = Description of Unknown: uncultivated organism with predicted taxonomy: Verrucomicrobia
  REGION 1..152: note = MG1-151 HNH domain
EDFMGKEQKKRMQIEMKKRASEKMLIAKKLDEAGYKGGNLLLKMELLEKQGGICLYTGEPLLPSELGVLEIEHIVPRSRGGPDAQYNYVLTREKTNKEKADRTPFEWLSSDPVKWAGYSDRVKARAGQLGRKRCELLLEKNAEELVEKYTAL

SEQ ID NO: 3783 - protein, 158 aa, unidentified; identical to SEQ ID NO: 3723
  REGION 1..158: note = Description of Unknown: uncultivated organism
  REGION 1..158: note = MG1-152 HNH domain

SEQ ID NO: 3784 - protein, 152 aa, unidentified; identical to SEQ ID NO: 3692
  REGION 1..152: note = Description of Unknown: uncultivated organism with predicted taxonomy: unclassified Verrucomicrobia (miscellaneous)
  REGION 1..152: note = MG1-153 HNH domain

SEQ ID NO: 3785 - protein, 158 aa, unidentified
  REGION 1..158: note = Description of Unknown: uncultivated organism with predicted taxonomy: Verrucomicrobia
  REGION 1..158: note = MG1-154 HNH domain
DDFLGKKAKSDLNKAIKTRFDEKKKLAEDLDSKREEFGLKYASKKMLLKFELYKKQGGECVYTGNALPLSELENLEVEHIVPRSRGGPDAMYNYVLTDEKTNKEKGDRTPFEWRSTMGAEWESYCERVRKLTKELGAKRCKLLLSPNAAELVEKYTAL

SEQ ID NO: 3786 - protein, 158 aa, unidentified
  REGION 1..158: note = Description of Unknown: uncultivated organism with predicted taxonomy: Verrucomicrobia
  REGION 1..158: note = MG1-155 HNH domain
DDFLGKKAKADLSRAINDRAKERKKYAEELDSQREIFGSKYASKKMLLKYELYSKQKGVCVYTGNALGFSNLEQLEVEHIVPRSRGGPDALYNYVLTDEKTNKEKGDRTPFEWLSSKGLEWESYCQRVRELTKEFGAKRCRLLLSPNAEELVEKYTAL

SEQ ID NO: 3787 - protein, 152 aa, unidentified; identical to SEQ ID NO: 3716
  REGION 1..152: note = Description of Unknown: uncultivated organism with predicted taxonomy: Coraliomargarita sp. CAG:312
  REGION 1..152: note = MG1-156 HNH domain

SEQ ID NO: 3788 - protein, 152 aa, unidentified
  REGION 1..152: note = Description of Unknown: uncultivated organism with predicted taxonomy: Verrucomicrobia
  REGION 1..152: note = MG1-157 HNH domain
DDFLGEKAKKEYQKAINERFKEKQELAKEMDEAGYKGAKMLLKLELYKKQGGQCVYTGEALPSSEIASLEIEHIVPRSRGGPDSIYNYVLTRERTNKEKADRTPYEWLSRDQQRWNAYVSRVNSLYKSLGGKRCKLLLANNAEELVDKYTAL

SEQ ID NO: 3789 - protein, 152 aa, unidentified
  REGION 1..152: note = Description of Unknown: uncultivated organism with predicted taxonomy: unclassified Verrucomicrobia (miscellaneous)
  REGION 1..152: note = MG1-158 HNH domain
EDFMGKEQKKRMQIEMKKRASEKMLIAKKLDEAGYKGGNLLLKMELLEKQGGVCLYTGEPLLPSELGVLEIEHIVPRSRGGPDAQYNYVLTREKTNKEKADRTPFEWLSSDPVKWAGYSDRVTARAGQLGRKRCELLLEKNAEELVEKYTAL

SEQ ID NO: 3790 - protein, 152 aa, unidentified
  REGION 1..152: note = Description of Unknown: uncultivated organism with predicted taxonomy: Coraliomargarita sp. CAG:312
  REGION 1..152: note = MG1-159 HNH domain
DDFIGKEKKKELNIAIKKRYSEKLKIAEKLDEIGFKGSKMLMKLELFQKQGGICLYTREPLLPTEIPSLEIEHIVPRSRGGPDSAYNFVLTREATNKEKANRTPFEWLSGDSQKWVSYSDRVMSRSKELGKKRCQLLLKENAEELVEKYTAL

SEQ ID NO: 3791 - protein, 152 aa, unidentified; identical to SEQ ID NO: 3692
  REGION 1..152: note = Description of Unknown: uncultivated organism with predicted taxonomy: unclassified Verrucomicrobia (miscellaneous)
  REGION 1..152: note = MG1-160 HNH domain

SEQ ID NO: 3792 - protein, 158 aa, unidentified; identical to SEQ ID NO: 3723
  REGION 1..158: note = Description of Unknown: uncultivated organism with predicted taxonomy: Verrucomicrobia
  REGION 1..158: note = MG1-161 HNH domain

SEQ ID NO: 3793 - protein, 152 aa, unidentified; identical to SEQ ID NO: 3716
  REGION 1..152: note = Description of Unknown: uncultivated organism with predicted taxonomy: Coraliomargarita sp. CAG:312
  REGION 1..152: note = MG1-162 HNH domain

SEQ ID NO: 3794 - protein, 152 aa, unidentified
  REGION 1..152: note = Description of Unknown: uncultivated organism with predicted taxonomy: unclassified Verrucomicrobia (miscellaneous)
  REGION 1..152: note = MG1-163 HNH domain
EDFMGKEQKKRMQIEMKKRASEKMLIAKKLDEAGYKGGNLLLKMELLEKQGGVCLYTGEPLLPSELGVLEIEHIVPRSRGGPDAQYNYVLPREKTNKEKADRTPFEWLSSDPVKWAGYSDRVKARAGQLGRKRCELLLEKNAEELVEKYTAL

SEQ ID NO: 3795 - protein, 158 aa, unidentified
  REGION 1..158: note = Description of Unknown: uncultivated organism with predicted taxonomy: Verrucomicrobia
  REGION 1..158: note = MG1-164 HNH domain
DDFLGSKAKKEMSQGIKKRFEEKKKLAEELDSQRAEFGNKYASKKMLLKFELYKKQRGRCVYTDNALPLSELENLEVEHIFPRSRGGADAMYNYVLTDENTNKQKGERTPFEWLSSDKTKWESYCDRVRSLTQSLGAKRCKLLVSPNAEELMQKYTAL

SEQ ID NO: 3796 - protein, 152 aa, unidentified; identical to SEQ ID NO: 3692
  REGION 1..152: note = Description of Unknown: uncultivated organism with predicted taxonomy: unclassified Verrucomicrobia (miscellaneous)
  REGION 1..152: note = MG1-165 HNH domain

SEQ ID NO: 3797 - protein, 152 aa, unidentified
  REGION 1..152: note = Description of Unknown: uncultivated organism with predicted taxonomy: unclassified Verrucomicrobia (miscellaneous)
  REGION 1..152: note = MG1-166 HNH domain
DDFMGEKEKKEMRIAMKKRAEEKMRIAKDLDEHGFKGGNLLLKMELYRKQNGICLYTGDALPLSELATLEIEHIVPRSRGGPDAQYNYVITREKTNKLKGDKTPYEWLSSDAKEWASYTDRVNACAKGLGKKRCRLLLEKDAEELVEKYTAL

SEQ ID NO: 3798 - protein, 152 aa, unidentified; identical to SEQ ID NO: 3692
  REGION 1..152: note = Description of Unknown: uncultivated organism with predicted taxonomy: unclassified Verrucomicrobia (miscellaneous)
  REGION 1..152: note = MG1-167 HNH domain

SEQ ID NO: 3799 - protein, 158 aa, unidentified; identical to SEQ ID NO: 3723
  REGION 1..158: note = Description of Unknown: uncultivated organism with predicted taxonomy: Verrucomicrobia
  REGION 1..158: note = MG1-168 HNH domain

SEQ ID NO: 3800 - protein, 152 aa, unidentified; identical to SEQ ID NO: 3692
  REGION 1..152: note = Description of Unknown: uncultivated organism with predicted taxonomy: unclassified Verrucomicrobia (miscellaneous)
  REGION 1..152: note = MG1-169 HNH domain

SEQ ID NO: 3801 - protein, 152 aa, unidentified; identical to SEQ ID NO: 3692
  REGION 1..152: note = Description of Unknown: uncultivated organism with predicted taxonomy: unclassified Verrucomicrobia (miscellaneous)
  REGION 1..152: note = MG1-170 HNH domain

SEQ ID NO: 3802 - protein, 152 aa, unidentified
  REGION 1..152: note = Description of Unknown: uncultivated organism with predicted taxonomy: unclassified Verrucomicrobia (miscellaneous)
  REGION 1..152: note = MG1-171 HNH domain
DDFMGEKEKKEMRIAMKKRAEEKMRIAKDLDEHGFKGDNLLLKMELYRKQNGICLYTGDALPLSELATLEIEHIVPRSRGGPDAQYNYVITREKTNKLKGDKTPYEWLSSDAKEWASYTDRVNACAKALGKKRCRLLLEKDAEELVEKYTAL

SEQ ID NO: 3803 - protein, 158 aa, unidentified; identical to SEQ ID NO: 3719
  REGION 1..158: note = Description of Unknown: uncultivated organism with predicted taxonomy: Verrucomicrobia
  REGION 1..158: note = MG1-172 HNH domain

SEQ ID NO: 3804 - protein, 152 aa, unidentified
  REGION 1..152: note = Description of Unknown: uncultivated organism with predicted taxonomy: unclassified Verrucomicrobia (miscellaneous)
  REGION 1..152: note = MG1-173 HNH domain
DDFMGEKEKKEMRIAMKKRAEEKMRIAKDLDEHGFKGGNLLLKMELYRKQNGICLYTGDALPLSELATLEIEHIVPRSRGGPDAQYNYVITREKTNKLKGDKTPYEWLSSDAKEWASYTDRVNACTKALGKKRCRLLLEKDAEELVEKYTAL

SEQ ID NO: 3805 - protein, 152 aa, unidentified; identical to SEQ ID NO: 3692
  REGION 1..152: note = Description of Unknown: uncultivated organism with predicted taxonomy: unclassified Verrucomicrobia (miscellaneous)
  REGION 1..152: note = MG1-174 HNH domain

SEQ ID NO: 3806 - protein, 158 aa, unidentified; identical to SEQ ID NO: 3719
  REGION 1..158: note = Description of Unknown: uncultivated organism with predicted taxonomy: Coraliomargarita sp. CAG:312
  REGION 1..158: note = MG1-175 HNH domain

SEQ ID NO: 3807 - protein, 152 aa, unidentified; identical to SEQ ID NO: 3734
  REGION 1..152: note = Description of Unknown: uncultivated organism with predicted taxonomy: unclassified Verrucomicrobia (miscellaneous)
  REGION 1..152: note = MG1-176 HNH domain

SEQ ID NO: 3808 - protein, 158 aa, unidentified; identical to SEQ ID NO: 3777
  REGION 1..158: note = Description of Unknown: uncultivated organism with predicted taxonomy: Verrucomicrobia
  REGION 1..158: note = MG1-177 HNH domain

SEQ ID NO: 3809 - protein, 152 aa, unidentified; identical to SEQ ID NO: 3790
  REGION 1..152: note = Description of Unknown: uncultivated organism with predicted taxonomy: Coraliomargarita sp. CAG:312
  REGION 1..152: note = MG1-178 HNH domain

SEQ ID NO: 3810 - protein, 158 aa, unidentified; identical to SEQ ID NO: 3773
  REGION 1..158: note = Description of Unknown: uncultivated organism with predicted taxonomy: Coraliomargarita sp. CAG:312
  REGION 1..158: note = MG1-179 HNH domain

SEQ ID NO: 3811 - protein, 152 aa, unidentified; identical to SEQ ID NO: 3764
  REGION 1..152: note = Description of Unknown: uncultivated organism with predicted taxonomy: unclassified Verrucomicrobia (miscellaneous)
  REGION 1..152: note = MG1-180 HNH domain

SEQ ID NO: 3812 - protein, 152 aa, unidentified; identical to SEQ ID NO: 3641
  REGION 1..152: note = Description of Unknown: uncultivated organism with predicted taxonomy: unclassified Verrucomicrobia (miscellaneous)
  REGION 1..152: note = MG1-181 HNH domain

SEQ ID NO: 3813 - protein, 152 aa, unidentified; identical to SEQ ID NO: 3641
  REGION 1..152: note = Description of Unknown: uncultivated organism with predicted taxonomy: unclassified Verrucomicrobia (miscellaneous)
  REGION 1..152: note = MG1-182 HNH domain

SEQ ID NO: 3814 - protein, 152 aa, unidentified; identical to SEQ ID NO: 3727
  REGION 1..152: note = Description of Unknown: uncultivated organism with predicted taxonomy: Coraliomargarita sp. CAG:312
  REGION 1..152: note = MG1-183 HNH domain

SEQ ID NO: 3815 - protein, 152 aa, unidentified; identical to SEQ ID NO: 3692
  REGION 1..152: note = Description of Unknown: uncultivated organism with predicted taxonomy: unclassified Verrucomicrobia (miscellaneous)
  REGION 1..152: note = MG1-184 HNH domain

SEQ ID NO: 3816 - protein, 152 aa, unidentified; identical to SEQ ID NO: 3716
  REGION 1..152: note = Description of Unknown: uncultivated organism with predicted taxonomy: Coraliomargarita sp. CAG:312
  REGION 1..152: note = MG1-185 HNH domain

SEQ ID NO: 3817 - protein, 152 aa, unidentified; identical to SEQ ID NO: 3692
  REGION 1..152: note = Description of Unknown: uncultivated organism with predicted taxonomy: unclassified Verrucomicrobia (miscellaneous)
  REGION 1..152: note = MG1-186 HNH domain

SEQ ID NO: 3818 - protein, 158 aa, unidentified; identical to SEQ ID NO: 3719
  REGION 1..158: note = Description of Unknown: uncultivated organism with predicted taxonomy: Verrucomicrobia
  REGION 1..158: note = MG1-187 HNH domain

SEQ ID NO: 3819 - protein, 152 aa, unidentified; identical to SEQ ID NO: 3716
  REGION 1..152: note = Description of Unknown: uncultivated organism with predicted taxonomy: Verrucomicrobia
  REGION 1..152: note = MG1-188 HNH domain

SEQ ID NO: 3820 - protein, 158 aa, unidentified; identical to SEQ ID NO: 3719
  REGION 1..158: note = Description of Unknown: uncultivated organism with predicted taxonomy: Verrucomicrobia
  REGION 1..158: note = MG1-189 HNH domain

SEQ ID NO: 3821 - protein, 152 aa, unidentified; identical to SEQ ID NO: 3692
  REGION 1..152: note = Description of Unknown: uncultivated organism with predicted taxonomy: unclassified Verrucomicrobia (miscellaneous)
  REGION 1..152: note = MG1-190 HNH domain

SEQ ID NO: 3822 - protein, 152 aa, unidentified; identical to SEQ ID NO: 3692
  REGION 1..152: note = Description of Unknown: uncultivated organism with predicted taxonomy: unclassified Verrucomicrobia (miscellaneous)
  REGION 1..152: note = MG1-191 HNH domain

SEQ ID NO: 3823 - protein, 152 aa, unidentified
  REGION 1..152: note = Description of Unknown: uncultivated organism with predicted taxonomy: unclassified Verrucomicrobia (miscellaneous)
  REGION 1..152: note = MG1-192 HNH domain
DDFMGEKEKKEMRIAMKKRAEEKMRIAKDLDGHGFKGGNLLLKMELYRKQNGICLYTGDALPLSELATLEIEHIVPRSRGGPDAQYNYVITREKTNKLKGDKTPYEWLSSDAKEWASYTDRVNACAKALGKKRCRLLLEKDAEELVEKYTAL

SEQ ID NO: 3824 - protein, 158 aa, unidentified; identical to SEQ ID NO: 3785
  REGION 1..158: note = Description of Unknown: uncultivated organism with predicted taxonomy: Verrucomicrobia
  REGION 1..158: note = MG1-193 HNH domain

SEQ ID NO: 3825 - protein, 152 aa, unidentified; identical to SEQ ID NO: 3764
  REGION 1..152: note = Description of Unknown: uncultivated organism with predicted taxonomy: unclassified Verrucomicrobia (miscellaneous)
  REGION 1..152: note = MG1-194 HNH domain

SEQ ID NO: 3826 - protein, 152 aa, unidentified; identical to SEQ ID NO: 3692
  REGION 1..152: note = Description of Unknown: uncultivated organism with predicted taxonomy: unclassified Verrucomicrobia (miscellaneous)
  REGION 1..152: note = MG1-195 HNH domain

SEQ ID NO: 3827 - protein, 152 aa, unidentified; identical to SEQ ID NO: 3782
  REGION 1..152: note = Description of Unknown: uncultivated organism with predicted taxonomy: Verrucomicrobia
  REGION 1..152: note = MG1-196 HNH domain

SEQ ID NO: 3828 - protein, 152 aa, unidentified; identical to SEQ ID NO: 3692
  REGION 1..152: note = Description of Unknown: uncultivated organism with predicted taxonomy: unclassified Verrucomicrobia (miscellaneous)
  REGION 1..152: note = MG1-197 HNH domain

SEQ ID NO: 3829 - protein, 152 aa, unidentified
  REGION 1..152: note = Description of Unknown: uncultivated organism with predicted taxonomy: unclassified Verrucomicrobia (miscellaneous)
  REGION 1..152: note = MG1-198 HNH domain
DDFMGEKEKKEMRIAMKKRAEEKMRIAKDLDEHGFKGGNLLLKMELYRKQNGICLYTGDALPLSELATLEIEHIVPRSRGGPDAQYNYVITREKTNKLKGDKTPYEWLSSDAKEWASYTDRVNACAKAFGKKRCRLLLEKDAEELVEKYTAL

SEQ ID NO: 3830 - protein, 152 aa, unidentified; identical to SEQ ID NO: 3829
  REGION 1..152: note = Description of Unknown: uncultivated organism with predicted taxonomy: unclassified Verrucomicrobia (miscellaneous)
  REGION 1..152: note = MG1-199 HNH domain

SEQ ID NO: 3831 - protein, 158 aa, unidentified
  REGION 1..158: note = Description of Unknown: uncultivated organism
  REGION 1..158: note = MG1-200 HNH domain
DDFLGKKAKSDLNKAIKTRFDEKKKLAEDLDSKREEFGFKYASKKMLLKFELYKKQGGKCVYTGNALPLSELESLEIEHIVPRSRGGPDAMYNYVLTDEKTNKEKGDRTPFEWLSTMGAEWESYCERVRKLTKELGAKRCKLLLSPNAAELVEKYTAL

SEQ ID NO: 3832 - protein, 158 aa, unidentified; identical to SEQ ID NO: 3719
  REGION 1..158: note = Description of Unknown: uncultivated organism with predicted taxonomy: Verrucomicrobia
  REGION 1..158: note = MG1-201 HNH domain

SEQ ID NO: 3833 - protein, 158 aa, unidentified
  REGION 1..158: note = Description of Unknown: uncultivated organism with predicted taxonomy: Coraliomargarita sp. CAG:312
  REGION 1..158: note = MG1-202 HNH domain
DDFLGKKAKSDLNKAIKTRFDEKKKLAEELDSNRAEFGPKYASKKMLLKYELYKKQGGKCVYTGKALPLSELENLEIEHIVPRSRGGPDAMYNYVLTDEKTNKEKGDRTPFEWRSTMGAEWESYCERVRKLTKELGAKRCKLLLAPNAAELVEKYTAL

SEQ ID NO: 3834 - protein, 152 aa, unidentified; identical to SEQ ID NO: 3716
  REGION 1..152: note = Description of Unknown: uncultivated organism with predicted taxonomy: Coraliomargarita sp. CAG:312
  REGION 1..152: note = MG1-203 HNH domain

SEQ ID NO: 3835 - protein, 158 aa, unidentified; identical to SEQ ID NO: 3742
  REGION 1..158: note = Description of Unknown: uncultivated organism with predicted taxonomy: Verrucomicrobia
  REGION 1..158: note = MG1-204 HNH domain

SEQ ID NO: 3836 - protein, 158 aa, unidentified; identical to SEQ ID NO: 3719
  REGION 1..158: note = Description of Unknown: uncultivated organism with predicted taxonomy: Coraliomargarita sp. CAG:312
  REGION 1..158: note = MG1-205 HNH domain

SEQ ID NO: 3837 - protein, 152 aa, unidentified; identical to SEQ ID NO: 3716
  REGION 1..152: note = Description of Unknown: uncultivated organism with predicted taxonomy: Coraliomargarita sp. CAG:312
  REGION 1..152: note = MG1-206 HNH domain

SEQ ID NO: 3838 - protein, 152 aa, unidentified; identical to SEQ ID NO: 3752
  REGION 1..152: note = Description of Unknown: uncultivated organism with predicted taxonomy: unclassified Verrucomicrobia (miscellaneous)
  REGION 1..152: note = MG1-207 HNH domain

SEQ ID NO: 3839 - protein, 152 aa, unidentified; identical to SEQ ID NO: 3692
  REGION 1..152: note = Description of Unknown: uncultivated organism with predicted taxonomy: unclassified Verrucomicrobia (miscellaneous)
  REGION 1..152: note = MG1-208 HNH domain

SEQ ID NO: 3840 - protein, 152 aa, unidentified; identical to SEQ ID NO: 3741
  REGION 1..152: note = Description of Unknown: uncultivated organism with predicted taxonomy: unclassified Verrucomicrobia (miscellaneous)
  REGION 1..152: note = MG1-209 HNH domain

SEQ ID NO: 3841 - protein, 152 aa, unidentified; identical to SEQ ID NO: 3692
  REGION 1..152: note = Description of Unknown: uncultivated organism with predicted taxonomy: unclassified Verrucomicrobia (miscellaneous)
  REGION 1..152: note = MG1-210 HNH domain

SEQ ID NO: 3842 - protein, 152 aa, unidentified; identical to SEQ ID NO: 3718
  REGION 1..152: note = Description of Unknown: uncultivated organism with predicted taxonomy: Coraliomargarita sp. CAG:312
  REGION 1..152: note = MG1-211 HNH domain

SEQ ID NO: 3843 - protein, 152 aa, unidentified; identical to SEQ ID NO: 3692
  REGION 1..152: note = Description of Unknown: uncultivated organism with predicted taxonomy: unclassified Verrucomicrobia (miscellaneous)
  REGION 1..152: note = MG1-212 HNH domain

SEQ ID NO: 3844 - protein, 152 aa, unidentified; identical to SEQ ID NO: 3692
  REGION 1..152: note = Description of Unknown: uncultivated organism with predicted taxonomy: unclassified Verrucomicrobia (miscellaneous)
  REGION 1..152: note = MG1-213 HNH domain

SEQ ID NO: 3845 - protein, 152 aa, unidentified; identical to SEQ ID NO: 3692
  REGION 1..152: note = Description of Unknown: uncultivated organism with predicted taxonomy: unclassified Verrucomicrobia (miscellaneous)
  REGION 1..152: note = MG1-214 HNH domain

SEQ ID NO: 3846 - protein, 152 aa, unidentified; identical to SEQ ID NO: 3692
  REGION 1..152: note = Description of Unknown: uncultivated organism with predicted taxonomy: unclassified Verrucomicrobia (miscellaneous)
  REGION 1..152: note = MG1-215 HNH domain

SEQ ID NO: 3847 - protein, 152 aa, unidentified
  REGION 1..152: note = Description of Unknown: uncultivated organism with predicted taxonomy: unclassified Verrucomicrobia (miscellaneous)
  REGION 1..152: note = MG1-216 HNH domain
DDFMGEKEKKEMRIAMKKRAEEKMRIAKDLDEHGFKGGNLLLKMELYRKQNGICLYTGDALPLSELATLEIEHIVPRSRGGPDAQYNYVIIREKTNKLKGDKTPYEWLSSDAKEWASYTDRVNACAKALGKKRCRLLLEKDAEELVEKYTAL

SEQ ID NO: 3848 - protein, 152 aa, unidentified; identical to SEQ ID NO: 3716
  REGION 1..152: note = Description of Unknown: uncultivated organism with predicted taxonomy: Coraliomargarita sp. CAG:312
  REGION 1..152: note = MG1-217 HNH domain

SEQ ID NO: 3849 - protein, 152 aa, unidentified; identical to SEQ ID NO: 3692
  REGION 1..152: note = Description of Unknown: uncultivated organism with predicted taxonomy: unclassified Verrucomicrobia (miscellaneous)
  REGION 1..152: note = MG1-218 HNH domain

SEQ ID NO: 3850 - protein, 152 aa, unidentified; identical to SEQ ID NO: 3692
  REGION 1..152: note = Description of Unknown: uncultivated organism with predicted taxonomy: unclassified Verrucomicrobia (miscellaneous)
  REGION 1..152: note = MG1-219 HNH domain

SEQ ID NO: 3851 - protein, 152 aa, unidentified
  REGION 1..152: note = Description of Unknown: uncultivated organism with predicted taxonomy: unclassified Verrucomicrobia (miscellaneous)
  REGION 1..152: note = MG1-220 HNH domain
DDFMGEKEKKEMRIAMKKRAEGKMRIAKDLDEHGFKGGNLLLKMELYRKQNGICLYTGDALPLSELATLEIEHIVPRSRGGPDAQYNYVITREKTNKLKGDKTPYEWLSSDAKEWASYTDRVNACAKALGKKRCHLLLEKDAEELVEKYTAL

SEQ ID NO: 3852 - protein, 152 aa, unidentified; identical to SEQ ID NO: 3692
  REGION 1..152: note = Description of Unknown: uncultivated organism with predicted taxonomy: unclassified Verrucomicrobia (miscellaneous)
  REGION 1..152: note = MG1-221 HNH domain

SEQ ID NO: 3853 - protein, 152 aa, unidentified; identical to SEQ ID NO: 3692
  REGION 1..152: note = Description of Unknown: uncultivated organism with predicted taxonomy: unclassified Verrucomicrobia (miscellaneous)
  REGION 1..152: note = MG1-222 HNH domain

SEQ ID NO: 3854 - protein, 152 aa, unidentified; identical to SEQ ID NO: 3692
  REGION 1..152: note = Description of Unknown: uncultivated organism with predicted taxonomy: unclassified Verrucomicrobia (miscellaneous)
  REGION 1..152: note = MG1-223 HNH domain

SEQ ID NO: 3855 - protein, 152 aa, unidentified; identical to SEQ ID NO: 3641
  REGION 1..152: note = Description of Unknown: uncultivated organism with predicted taxonomy: unclassified Verrucomicrobia (miscellaneous)
  REGION 1..152: note = MG1-224 HNH domain

SEQ ID NO: 3856 - protein, 152 aa, unidentified; identical to SEQ ID NO: 3716
  REGION 1..152: note = Description of Unknown: uncultivated organism with predicted taxonomy: Coraliomargarita sp. CAG:312
  REGION 1..152: note = MG1-225 HNH domain

SEQ ID NO: 3857 - protein, 152 aa, unidentified; identical to SEQ ID NO: 3716
  REGION 1..152: note = Description of Unknown: uncultivated organism with predicted taxonomy: Coraliomargarita sp. CAG:312
  REGION 1..152: note = MG1-226 HNH domain

SEQ ID NO: 3858 - protein, 152 aa, unidentified
  REGION 1..152: note = Description of Unknown: uncultivated organism with predicted taxonomy: Coraliomargarita sp. CAG:312
  REGION 1..152: note = MG1-227 HNH domain
EDFMGKQAKKDLSLYMKKRFEEKIDIAKKLDDIGYKGNKMLLKMELLQKQGFACLYTGEALQETDLPILEIEHIVPRSLGGPDAAYNYVLTSESTNKAKGNQTPYKWLSPDRDKWRAYTERVRARAAELGSKRCRLLLSENAEELINKYTAL

SEQ ID NO: 3859 - protein, 152 aa, unidentified; identical to SEQ ID NO: 3692
  REGION 1..152: note = Description of Unknown: uncultivated organism with predicted taxonomy: unclassified Verrucomicrobia (miscellaneous)
  REGION 1..152: note = MG1-228 HNH domain

SEQ ID NO: 3860 - protein, 152 aa, unidentified; identical to SEQ ID NO: 3692
  REGION 1..152: note = Description of Unknown: uncultivated organism with predicted taxonomy: Verrucomicrobia
  REGION 1..152: note = MG1-229 HNH domain

SEQ ID NO: 3861 - protein, 152 aa, unidentified
  REGION 1..152: note = Description of Unknown: uncultivated organism with predicted taxonomy: Verrucomicrobia
  REGION 1..152: note = MG1-230 HNH domain
DDFMGEKEKKEMRIAMKKRAEEKMRIAKDLDEHGFKGGNLLLKMELYRKQNGICLYTGDALPLSELATLEIEHIVPRSRGGPDAQYNYVITREKTNKLKGDKTPYEWLSSDAKEWASYTDRVNACAKALGKKRCRLLLEKDAEELVEKYTTL

SEQ ID NO: 3862 - protein, 152 aa, unidentified; identical to SEQ ID NO: 3692
  REGION 1..152: note = Description of Unknown: uncultivated organism with predicted taxonomy: unclassified Verrucomicrobia (miscellaneous)
  REGION 1..152: note = MG1-231 HNH domain

SEQ ID NO: 3863 - protein, 158 aa, unidentified; identical to SEQ ID NO: 3719
  REGION 1..158: note = Description of Unknown: uncultivated organism with predicted taxonomy: Verrucomicrobia
  REGION 1..158: note = MG1-232 HNH domain

SEQ ID NO: 3864 - protein, 152 aa, unidentified; identical to SEQ ID NO: 3745
  REGION 1..152: note = Description of Unknown: uncultivated organism
  REGION 1..152: note = MG1-233 HNH domain

SEQ ID NO: 3865 - protein, 152 aa, unidentified; identical to SEQ ID NO: 3692
  REGION 1..152: note = Description of Unknown: uncultivated organism with predicted taxonomy: unclassified Verrucomicrobia (miscellaneous)
  REGION 1..152: note = MG1-234 HNH domain

SEQ ID NO: 3866 - protein, 152 aa, unidentified; identical to SEQ ID NO: 3692
  REGION 1..152: note = Description of Unknown: uncultivated organism with predicted taxonomy: unclassified Verrucomicrobia (miscellaneous)
  REGION 1..152: note = MG1-236 HNH domain

SEQ ID NO: 3867 - protein, 152 aa, unidentified; identical to SEQ ID NO: 3692
  REGION 1..152: note = Description of Unknown: uncultivated organism with predicted taxonomy: Verrucomicrobia
  REGION 1..152: note = MG1-237 HNH domain

SEQ ID NO: 3868 - protein, 152 aa, unidentified; identical to SEQ ID NO: 3716
  REGION 1..152: note = Description of Unknown: uncultivated organism with predicted taxonomy: Coraliomargarita sp. CAG:312
  REGION 1..152: note = MG1-238 HNH domain

SEQ ID NO: 3869 - protein, 152 aa, unidentified; identical to SEQ ID NO: 3641
  REGION 1..152: note = Description of Unknown: uncultivated organism with predicted taxonomy: unclassified Verrucomicrobia (miscellaneous)
  REGION 1..152: note = MG1-239 HNH domain

SEQ ID NO: 3870 - protein, 152 aa, unidentified; identical to SEQ ID NO: 3692
  REGION 1..152: note = Description of Unknown: uncultivated organism with predicted taxonomy: unclassified Verrucomicrobia (miscellaneous)
  REGION 1..152: note = MG1-240 HNH domain

SEQ ID NO: 3871 - protein, 152 aa, unidentified; identical to SEQ ID NO: 3716
  REGION 1..152: note = Description of Unknown: uncultivated organism with predicted taxonomy: Verrucomicrobia
  REGION 1..152: note = MG1-241 HNH domain

SEQ ID NO: 3872 - protein, 152 aa, unidentified; identical to SEQ ID NO: 3716
  REGION 1..152: note = Description of Unknown: uncultivated organism with predicted taxonomy: Coraliomargarita sp. CAG:312
  REGION 1..152: note = MG1-242 HNH domain

SEQ ID NO: 3873 - protein, 158 aa, unidentified; identical to SEQ ID NO: 3786
  REGION 1..158: note = Description of Unknown: uncultivated organism with predicted taxonomy: Verrucomicrobia
  REGION 1..158: note = MG1-243 HNH domain

SEQ ID NO: 3874 - protein, 152 aa, unidentified; identical to SEQ ID NO: 3692
  REGION 1..152: note = Description of Unknown: uncultivated organism with predicted taxonomy: unclassified Verrucomicrobia (miscellaneous)
  REGION 1..152: note = MG1-244 HNH domain

SEQ ID NO: 3875 - protein, 152 aa, unidentified; identical to SEQ ID NO: 3716
  REGION 1..152: note = Description of Unknown: uncultivated organism with predicted taxonomy: Coraliomargarita sp. CAG:312
  REGION 1..152: note = MG1-245 HNH domain

SEQ ID NO: 3876 - protein, 152 aa, unidentified; identical to SEQ ID NO: 3752
  REGION 1..152: note = Description of Unknown: uncultivated organism with predicted taxonomy: unclassified Verrucomicrobia (miscellaneous)
  REGION 1..152: note = MG1-246 HNH domain

SEQ ID NO: 3877 - protein, 152 aa, unidentified; identical to SEQ ID NO: 3716
  REGION 1..152: note = Description of Unknown: uncultivated organism with predicted taxonomy: Coraliomargarita sp. CAG:312
  REGION 1..152: note = MG1-247 HNH domain

SEQ ID NO: 3878 - protein, 152 aa, unidentified; identical to SEQ ID NO: 3782
  REGION 1..152: note = Description of Unknown: uncultivated organism with predicted taxonomy: unclassified Verrucomicrobia (miscellaneous)
  REGION 1..152: note = MG1-248 HNH domain

SEQ ID NO: 3879 - protein, 152 aa, unidentified; identical to SEQ ID NO: 3692
  REGION 1..152: note = Description of Unknown: uncultivated organism with predicted taxonomy: unclassified Verrucomicrobia (miscellaneous)
  REGION 1..152: note = MG1-249 HNH domain

SEQ ID NO: 3880 - protein, 152 aa, unidentified; identical to SEQ ID NO: 3716
  REGION 1..152: note = Description of Unknown: uncultivated organism with predicted taxonomy: Coraliomargarita sp. CAG:312
  REGION 1..152: note = MG1-250 HNH domain

SEQ ID NO: 3881 - protein, 152 aa, unidentified; identical to SEQ ID NO: 3716
  REGION 1..152: note = Description of Unknown: uncultivated organism with predicted taxonomy: Coraliomargarita sp. CAG:312
  REGION 1..152: note = MG1-251 HNH domain

SEQ ID NO: 3882 - protein, 152 aa, unidentified; identical to SEQ ID NO: 3774
  REGION 1..152: note = Description of Unknown: uncultivated organism with predicted taxonomy: unclassified Verrucomicrobia (miscellaneous)
  REGION 1..152: note = MG1-252 HNH domain

SEQ ID NO: 3883 - protein, 152 aa, unidentified; identical to SEQ ID NO: 3692
  REGION 1..152: note = Description of Unknown: uncultivated organism with predicted taxonomy: unclassified Verrucomicrobia (miscellaneous)
  REGION 1..152: note = MG1-253 HNH domain

SEQ ID NO: 3884 - protein, 152 aa, unidentified; identical to SEQ ID NO: 3692
  REGION 1..152: note = Description of Unknown: uncultivated organism with predicted taxonomy: unclassified Verrucomicrobia (miscellaneous)
  REGION 1..152: note = MG1-254 HNH domain

SEQ ID NO: 3885 - protein, 152 aa, unidentified; identical to SEQ ID NO: 3692
  REGION 1..152: note = Description of Unknown: uncultivated organism with predicted taxonomy: unclassified Verrucomicrobia (miscellaneous)
  REGION 1..152: note = MG1-255 HNH domain

SEQ ID NO: 3886 - protein, 152 aa, unidentified; identical to SEQ ID NO: 3692
  REGION 1..152: note = Description of Unknown: uncultivated organism with predicted taxonomy: unclassified Verrucomicrobia (miscellaneous)
  REGION 1..152: note = MG1-256 HNH domain

SEQ ID NO: 3887 - protein, 152 aa, unidentified; identical to SEQ ID NO: 3692
  REGION 1..152: note = Description of Unknown: uncultivated organism with predicted taxonomy: unclassified Verrucomicrobia (miscellaneous)
  REGION 1..152: note = MG1-257 HNH domain

SEQ ID NO: 3888 - protein, 158 aa, unidentified; identical to SEQ ID NO: 3723
  REGION 1..158: note = Description of Unknown: uncultivated organism with predicted taxonomy: Verrucomicrobia
  REGION 1..158: note = MG1-258 HNH domain

SEQ ID NO: 3889 - protein, 152 aa, unidentified; identical to SEQ ID NO: 3692
  REGION 1..152: note = Description of Unknown: uncultivated organism with predicted taxonomy: unclassified Verrucomicrobia (miscellaneous)
  REGION 1..152: note = MG1-259 HNH domain

SEQ ID NO: 3890 - protein, 152 aa, unidentified; identical to SEQ ID NO: 3764
  REGION 1..152: note = Description of Unknown: uncultivated organism with predicted taxonomy: unclassified Verrucomicrobia (miscellaneous)
  REGION 1..152: note = MG1-260 HNH domain

SEQ ID NO: 3891 - protein, 152 aa, unidentified; identical to SEQ ID NO: 3692
  REGION 1..152: note = Description of Unknown: uncultivated organism with predicted taxonomy: unclassified Verrucomicrobia (miscellaneous)
  REGION 1..152: note = MG1-261 HNH domain

SEQ ID NO: 3892 - protein, 152 aa, unidentified; identical to SEQ ID NO: 3641
  REGION 1..152: note = Description of Unknown: uncultivated organism with predicted taxonomy: unclassified Verrucomicrobia (miscellaneous)
  REGION 1..152: note = MG1-262 HNH domain

SEQ ID NO: 3893 - protein, 152 aa, unidentified; identical to SEQ ID NO: 3788
  REGION 1..152: note = Description of Unknown: uncultivated organism with predicted taxonomy: Verrucomicrobia
  REGION 1..152: note = MG1-263 HNH domain

SEQ ID NO: 3894 - protein, 152 aa, unidentified; identical to SEQ ID NO: 3641
  REGION 1..152: note = Description of Unknown: uncultivated organism with predicted taxonomy: unclassified Verrucomicrobia (miscellaneous)
  REGION 1..152: note = MG1-264 HNH domain

SEQ ID NO: 3895 - protein, 152 aa, unidentified; identical to SEQ ID NO: 3794
  REGION 1..152: note = Description of Unknown: uncultivated organism with predicted taxonomy: unclassified Verrucomicrobia (miscellaneous)
  REGION 1..152: note = MG1-265 HNH domain

SEQ ID NO: 3896 - protein, 152 aa, unidentified; identical to SEQ ID NO: 3716
  REGION 1..152: note = Description of Unknown: uncultivated organism with predicted taxonomy: Coraliomargarita sp. CAG:312
  REGION 1..152: note = MG1-266 HNH domain

SEQ ID NO: 3897 - protein, 158 aa, unidentified; identical to SEQ ID NO: 3740
  REGION 1..158: note = Description of Unknown: uncultivated organism with predicted taxonomy: Verrucomicrobia
  REGION 1..158: note = MG1-267 HNH domain

SEQ ID NO: 3898 - protein, 152 aa, unidentified; identical to SEQ ID NO: 3692
  REGION 1..152: note = Description of Unknown: uncultivated organism with predicted taxonomy: Verrucomicrobia
  REGION 1..152: note = MG1-268 HNH domain

SEQ ID NO: 3899 - protein, 152 aa, unidentified; identical to SEQ ID NO: 3692
  REGION 1..152: note = Description of Unknown: uncultivated organism with predicted taxonomy: unclassified Verrucomicrobia (miscellaneous)
  REGION 1..152: note = MG1-269 HNH domain

SEQ ID NO: 3900 - protein, 152 aa, unidentified; identical to SEQ ID NO: 3733
  REGION 1..152: note = Description of Unknown: uncultivated organism with predicted taxonomy: Verrucomicrobia
  REGION 1..152: note = MG1-270 HNH domain

SEQ ID NO: 3901 - protein, 152 aa, unidentified; identical to SEQ ID NO: 3692
  REGION 1..152: note = Description of Unknown: uncultivated organism with predicted taxonomy: unclassified Verrucomicrobia (miscellaneous)
  REGION 1..152: note = MG1-271 HNH domain

SEQ ID NO: 3902 - protein, 183 aa, unidentified
  REGION 1..183: note = Description of Unknown: uncultivated organism
  REGION 1..183: note = MG1-272 HNH domain
ELEQDAEAAQDAWERRKKDREENQTARATLKDMGVKAPTDKDVRKFRLLQECKWRCPYTLERFMQTEFDDLVIQRIVPPAGDPRRSAYLEAARSAMQGTQVEHMVPQAAIVCDEWFNVTVTRPTTNTTKGDRTPYDFVLRDGDKDRRKQLLENAEQCFGKDSLKFKIFSSDNARSLIQERDKL

SEQ ID NO: 3903 - protein, 185 aa, unidentified
  REGION 1..185: note = Description of Unknown: uncultivated organism with predicted taxonomy: Rhizobiales
  REGION 1..185: note = MG1-273 HNH domain
DLMMNQEQKDAKEAKDKERRKERDEAAQILRDMGFAPDADNIKKFLLAQEAGWRCPFTLRPFCQSDFSQLTVTQLIQAENKPRFVKEASSVFDRLEIEHLVPRTPVVCNEWFNLTVTLHSTNAQKRKRTPFQWLFADKDGLPADLDWERIRKNAVERFGESSLKYQVFTSPDGAKLVEDNAKKSI

SEQ ID NO: 3904 - protein, 185 aa, unidentified
  REGION 1..185: note = Description of Unknown: uncultivated organism
  REGION 1..185: note = MG1-274 HNH domain
DLMMNQKQKDAKEAKDRERRDERDKAAQILRDMGYAPTADNIKKFLLAQEVGWRCPFTLQAFCQSDFSRLTITQLAQAENKPRFLKEASSVFRRLEVEHLVPRTPVVCNEWYNLTVTLHSTNAQKGKRTPFQWLSIDKDGVPPDLDWDCACKNAADRFGANSLKYQIFTSPNAAEIIADNAKRSI

SEQ ID NO: 3905 - protein, 161 aa, unidentified; identical to SEQ ID NO: 3650
  REGION 1..161: note = Description of Unknown: uncultivated organism
  REGION 1..161: note = MG1-275 HNH domain

SEQ ID NO: 3906 - protein, 151 aa, unidentified
  REGION 1..151: note = Description of Unknown: uncultivated organism with predicted taxonomy: Verrucomicrobia bacterium IMCC26134
  REGION 1..151: note = MG1-276 HNH domain
EDFMGQKAKLEYLKFQRERARARAEAREEAAKAGATENSAGLKMELHKAQGGICLYTGDGLAVTSLDDYDIDHIVPESQGGPDALLNKVLTTRLANREKANRTPYEWLASSDRWDAYVERGKKRLTTLRNKKVQLLTSPEATALVEKYTAL

SEQ ID NO: 3907 - protein, 153 aa, unidentified
  REGION 1..153: note = Description of Unknown: uncultivated organism
  REGION 1..153: note = MG1-277 HNH domain
SLALGKTKKRELIQRIHNNREERDGIRKELSKDGFSSSKNSILRYRLFKEAKGRCPFCLCPFCLQAVLFKEAEIEHIVPRSRVDCNEFYNLTVAHADCNKKKDNRTPWEAFGQTPDWEALRRNAEECFGLGSMKYKLFTNPDAQDLVEEKSDL

SEQ ID NO: 3908 - protein, 108 aa, unidentified
  REGION 1..108: note = Description of Unknown: uncultivated organism with predicted taxonomy: Pedosphaera sp. Tous-C6FEB
  REGION 1..108: note = MG1-278 HNH domain
EDFMGEEAVKKYQRFLNDRADERKKAREEAEKLGLESRSSGLRYELFKAQGGICLYTGKSLGETSLDDYEIDHIVPRSLGVPDAALNYVLTFHDVNHAKEKGKLTPYA

SEQ ID NO: 3909 - protein, 151 aa, unidentified
  REGION 1..151: note = Description of Unknown: uncultivated organism
  REGION 1..151: note = MG1-279 HNH domain
SLALGQKAKNELNQRNEKFRKERENAREQLSSNKESFSRKAIQRYRLWQEAKGRCPFCLQMIERTELGHGADIEHLVPRSIVDCNEFYNLTVAHIKCNRELKGDRTPFAAFSGTSQWPDIKDHAEKTFFGRKLEIFLSPDAEQLIEQKSDL

SEQ ID NO: 3910 - protein, 183 aa, unidentified; identical to SEQ ID NO: 3902
  REGION 1..183: note = Description of Unknown: uncultivated organism
  REGION 1..183: note = MG1-280 HNH domain

SEQ ID NO: 3911 - protein, 153 aa, unidentified; identical to SEQ ID NO: 3907
  REGION 1..153: note = Description of Unknown: uncultivated organism with predicted taxonomy: Thermoflexibacter ruber
  REGION 1..153: note = MG1-281 HNH domain

SEQ ID NO: 3912 - protein, 153 aa, unidentified; identical to SEQ ID NO: 3907
  REGION 1..153: note = Description of Unknown: uncultivated organism
  REGION 1..153: note = MG1-282 HNH domain

SEQ ID NO: 3913 - protein, 158 aa, unidentified
  REGION 1..158: note = Description of Unknown: uncultivated organism with predicted taxonomy: Verrucomicrobia bacterium IMCC26134
  REGION 1..158: note = MG1-283 HNH domain
EDFMGEKAKRELKDFQDKREAARKKAREKATAAGSEEKSAALKFELCEAQGFICLYCGQPFATTKLNECRIEHIVPTAQGGPDAMVNYVAAHDECNEAKGKQTPFQWWHHNTSGKAPTISWDGYKALVDKYATTLRNKKVQLLTREDAVELVGRYTAL

SEQ ID NO: 3914 - protein, 153 aa, unidentified
  REGION 1..153: note = Description of Unknown: uncultivated organism
  REGION 1..153: note = MG1-284 HNH domain
SLAMGEKKRREHIQRIKENRDERESIRTELKKDNFSSSKNSILRYRLFKEAKGRCPFCLCPFCLQEVVYKEAEIEHIVPRSRVDCNEFYNLTVAHQECNKKKDSRTPWEAYGTTKDWEALRKNAEDCFGLGSLKYRLFTNPDAQNLVEEKSDL

SEQ ID NO: 3915 - protein, 153 aa, unidentified
  REGION 1..153: note = Description of Unknown: uncultivated organism with predicted taxonomy: Verrucomicrobia
  REGION 1..153: note = MG1-285 HNH domain
EDFMGKKAKIEYFSFIKRRAEERIKAREEAANAGATEKSAGLKLELLRAQDGCCLYTNEGLVPSRLDEYQIDHIVPRSKGGPDAVVNYALTTQKANEAKADRTPYDWFHQEMPDKWDAYVNRVRSRATHLRNKKVQLLVALNAAELADKYTAL

SEQ ID NO: 3916 - protein, 153 aa, unidentified; identical to SEQ ID NO: 3642
  REGION 1..153: note = Description of Unknown: uncultivated organism with predicted taxonomy: Verrucomicrobia
  REGION 1..153: note = MG1-287 HNH domain

SEQ ID NO: 3917 - protein, 153 aa, unidentified; identical to SEQ ID NO: 3642
  REGION 1..153: note = Description of Unknown: uncultivated organism
  REGION 1..153: note = MG1-288 HNH domain

SEQ ID NO: 3918 - protein, 47 aa, unidentified
  REGION 1..47: note = Description of Unknown: uncultivated organism with predicted taxonomy: Pedosphaera sp. Tous-C6FEB
  REGION 1..47: note = MG1-289 HNH domain
EDFMGEEAKREYQNFINEREKDRKAAREEAGKLGFDSRSSGLRYELW

SEQ ID NO: 3919 - protein, 151 aa, unidentified
  REGION 1..151: note = Description of Unknown: uncultivated organism with predicted taxonomy: Deltaproteobacteria bacterium RIFOXYA12_FULL_61_11
  REGION 1..151: note = MG1-290 HNH domain
SLGLGKKANDDLKKKQATQREEREAARQEAAEHHAAGSQAVLRFRLAKEVGKVCPYCHQPFHADLADAEIEHILPRALGGSDQQVNLTVAHTHCNHEKHDQLPHAAWGEADRWPCLERFAREHFKGLKLQLFLHQGNPEEALALLAPPADL

SEQ ID NO: 3920 - protein, 149 aa, unidentified
  REGION 1..149: note = Description of Unknown: uncultivated organism with predicted taxonomy: Candidatus Termititenax aidoneus
  REGION 1..149: note = MG1-291 HNH domain
EDFMGDKKRREYIKIMNQRRKAKDEAFNEIKDLVKGKQSLIKQLLLKEQGCKDIYSYETLIPSQLNDYEIDHIVPRSKGGSDAMYNKVLTKASNNQEKGNRIPFEWLSADKEKWNMFYKNVESFRLNWKKKELLLAKDPTLLIEKYTTL

SEQ ID NO: 3921 - protein, 155 aa, unidentified
  REGION 1..155: note = Description of Unknown: uncultivated organism with predicted taxonomy: Candidatus Termititenax aidoneus
  REGION 1..155: note = MG1-292 HNH domain
DEFMGKQAKEDYYKFIKEQTKERKIVVEELEKAGFSKPSGEMIRKMMLFRQQDGIDFYSMQNIKLSHLGEYEIDHVIPRSRGGSDAFYNIILTTNKNNSAKGDKTPYEWLGKGDIWDNISEKLKVNKKMGSKKKLLFMASSEEQYKLLIDKYTQL

SEQ ID NO: 3922 - protein, 155 aa, unidentified; identical to SEQ ID NO: 3921
  REGION 1..155: note = Description of Unknown: uncultivated organism with predicted taxonomy: Elusimicrobia bacterium HGW-Elusimicrobia-1
  REGION 1..155: note = MG1-293 HNH domain

SEQ ID NO: 3923 - protein, 157 aa, unidentified
  REGION 1..157: note = Description of Unknown: uncultivated organism with predicted taxonomy: Endomicrobium proavitum
  REGION 1..157: note = MG1-294 HNH domain
EDFAGEEKRKEYIDTQNKNTKNIELAVKLLKEANKQLNNRNILKARLLIEQNNVDLYEIDEHRKISITNIDDYEIDHIIPRSRGGSDSFSNFVITSINNNQTKLNRTPYEWFHQDKSFDAWNTYIKNIEGIKGLSKHKIKLLISDKAIELENKKTDL

SEQ ID NO: 3924 - protein, 149 aa, unidentified
  REGION 1..149: note = Description of Unknown: uncultivated organism with predicted taxonomy: Verrucomicrobia bacterium 12-59-8
  REGION 1..149: note = MG1-295 HNH domain
EDFMGEEAKKKLQKFQNENRKAWDQARSQARELNLSGGGNVRKLRMLREQNFICPYTGDTLSENEVDTLEVEHIVPRARGGSDNQYNKVVTRTRTNREKGDHTPYEWLTQKEEFAAFCERVEKMGLSRKKKEILTAKDPFTLDQKWDSL

SEQ ID NO: 3925 - protein, 166 aa, unidentified
  REGION 1..166: note = Description of Unknown: uncultivated organism
  REGION 1..166: note = MG1-296 HNH domain
EEFLGEDKRAQYIKTQNENRKDKDLAKEELMTVIKSADPSYQTKLLKVRLLREQHYKDVYDLTENCALSIQDIDDYDIDHIVPISCGGADSMVNKVLTKKELNETKKQNQTPYEMYFQNASAETWAKYLEHLKDVYGKNISKHLEKKYELLTSDKAIEIESKRNDL

SEQ ID NO: 3926 - protein, 149 aa, unidentified
  REGION 1..149: note = Description of Unknown: uncultivated organism with predicted taxonomy: Verrucomicrobia bacterium 12-59-8
  REGION 1..149: note = MG1-297 HNH domain
EDFMGEEAKEKPKKFQNENRKAWDQARSQARELNLSGGGNVRKLRMLREQNFICPYTGDTLSENEVDTLEVEHIVPRARGGSDNQYNKVVTRSQTNREKGDHTPYEWLTQKGEFAAFCERVEKMGLSRKKKEILTAKDPFTLDQKWDSL

SEQ ID NO: 3927 - protein, 158 aa, unidentified
  REGION 1..158: note = Description of Unknown: uncultivated organism
  REGION 1..158: note = MG1-298 HNH domain
DEFLSEEEKADLNRANKERQKNNKKAYEELKKYGLEISHDNMEKYKLCESQKWTDIYNVFDDKKKISPEDLPNYDIDHIVPVSSGGADSLANKVVTARHLNQSQKSNKTPYQWLFEDKIKWADFLENIKNAGIDKNSKKYLFLTAKDAVSQAKSLNDL

SEQ ID NO: 3928 - protein, 154 aa, unidentified
  REGION 1..154: note = Description of Unknown: uncultivated organism
  REGION 1..154: note = MG1-299 HNH domain
EDFMGDKARMELKKFQNDRAKARAEARERVAELGISEKNSLRYELWKAQGGRCLYTDDPLAETELDNYHVDHIVPRAKGGPDSRLNYVLTLNQTNDDKDDRTPFEWLSCNPARWLAYVNRVESRLKAADGISRKTAQLLTLPNAVELAEKYTAL

SEQ ID NO: 3929 - protein, 154 aa, unidentified
  REGION 1..154: note = Description of Unknown: uncultivated organism
  REGION 1..154: note = MG1-300 HNH domain
EDFMGEEAKKRYLKFMNDRAKSRAEAREKVAALGISDKNILRYELWKSQGCRCLYTDLPLEETKLDDYKVDHIVPRAQGGPDSRLNYALTHNATNDEKDDRTPYEWLSGDSVKWQAYLNRVNARLKAADGISRKTAQLLTLPNAAELAEKYTAL

SEQ ID NO: 3930 - protein, 154 aa, unidentified
  REGION 1..154: note = Description of Unknown: uncultivated organism
  REGION 1..154: note = MG1-301 HNH domain
EDFMGEKARMELRNFQNRRAKARAEARERVAELGISEKNSLRYELFKAQGGRCLYTDDPLAETELDNYRVDHIVPRAKGGPDSRLNYALTLNQTNDDKGDRTPYEWLSGNPVRWQAYLNRVEARLKTTDGISRKTAQLLTLPNAVELAEKYTAL

SEQ ID NO: 3931 - protein, 154 aa, unidentified
  REGION 1..154: note = Description of Unknown: uncultivated organism
  REGION 1..154: note = MG1-302 HNH domain
EDFMGDKARKELQKFQNDRAKARAEARERVAELGISEKNSLRYELWKAQGGRCLYNDDPLAETDLDNYHVDHIVPRAKGGPDSRLNYALTLNQTNDDKGDRTPYEWLSGNPVRWQAYLNRVEARLKAADGISRKTAQLLTLPNAAELAEKYTAL

SEQ ID NO: 3932 - protein, 154 aa, unidentified; identical to SEQ ID NO: 3931
  REGION 1..154: note = Description of Unknown: uncultivated organism
  REGION 1..154: note = MG1-303 HNH domain

SEQ ID NO: 3933 - protein, 160 aa, unidentified
  REGION 1..160: note = Description of Unknown: uncultivated organism with predicted taxonomy: Verrucomicrobia
  REGION 1..160: note = MG1-304 HNH domain
NDKDNSLEGQKRTQVYQDILKRNEDRRETARKALRASSLPDSDEMVVRWLLYQEQGPFCIYSGQPIRCSELPNLQIEHIVPRALGGPDAYWNWVLCKTDQNVEKGNRVPYQWFHEEKKSGEWEDYRRRVRNRATWLGSRKVDLLLRADAKELVGEKYTAL

SEQ ID NO: 3934 - protein, 154 aa, unidentified
  REGION 1..154: note = Description of Unknown: uncultivated organism with predicted taxonomy: Verrucomicrobia bacterium IMCC26134
  REGION 1..154: note = MG1-305 HNH domain
EDFMGDKARMELKKFQNDRAKARAEARERVAELGISEKNSLRYELWKAQGGRCLYMDDPLAETELDNYRIDHIVPRAKCGPDSRLNYALTLNQTNDDKGDRTPYEWLSGNPERWRAYLNRVEARLRAADGISRKTAQLLTLPNAVELAEKFTAL

SEQ ID NO: 3935 - protein, 151 aa, unidentified
  REGION 1..151: note = Description of Unknown: uncultivated organism with predicted taxonomy: Verrucomicrobia
  REGION 1..151: note = MG1-306 HNH domain
EDFMGKKAKIEYFKFQRDRAAQRAKAREEAAKAGAGEGAAGLKMELLEAQGGACLYTGEALAPTSLDDYVIDHIVPRAKGGPDSALNYVLTTRRANDDKADRTPHEWLSATNGWDAYVERVKKRTTALRNKKASLLVSPEAETLVQRYTAL

SEQ ID NO: 3936 - protein, 185 aa, unidentified; identical to SEQ ID NO: 3904
  REGION 1..185: note = Description of Unknown: uncultivated organism with predicted taxonomy: Verrucomicrobia bacterium IMCC26134
  REGION 1..185: note = MG1-307 HNH domain

SEQ ID NO: 3937 - protein, 172 aa, unidentified
  REGION 1..172: note = Description of Unknown: uncultivated organism
  REGION 1..172: note = MG1-308 HNH domain
DPPRNKKEQDARASLNVENREFIENLLKDYGYEGAHSRSLINRLKLYRQQGGEAKDGQVTKEAVCPFTGMPLGKNPLSSDLDLAHLFPDGRGGLAIEDNLVLTKRSVNQDMGQRTPREVAGTRMGKTSFLSWNEMLARSKSFKWNDKKRELFAFEPAKGQPVPDFENLTRTA

SEQ ID NO: 3938 - protein, 154 aa, unidentified
  REGION 1..154: note = Description of Unknown: uncultivated organism
  REGION 1..154: note = MG1-309 HNH domain
DMPRNQDQSREIQKEQKERREERRHIAAIYGLDFDVLTEPQKRRLFLFHEQAGRDGEAVCPYTGESLGRDPLAADLEIEHIYPQRRGGLSIMENLAITRRATNAEKGNRTPVEWLGYEKAAEQASRMRWSKRKLEVFLWREERCPDWENLTRTA

SEQ ID NO: 3939 - protein, 167 aa, unidentified
  REGION 1..167: note = Description of Unknown: uncultivated organism
  REGION 1..167: note = MG1-310 HNH domain
DPPRNAQQRAERQKEIEANREKHEKLFEQYGIEDSGVASKRRRIMLYEQQRGKCPYTGKDLPSNPLDPSLEIEHIFPAEMGGLSVDDNLVLTWRSVNAEKGKRTPLQWAGERFDAMLANTRDMRWSARKREIFAWGTIREDKPDKPSHYNADGTLRVPDFGNTTRTA

SEQ ID NO: 3940 - protein, 171 aa, unidentified
  REGION 1..171: note = Description of Unknown: uncultivated organism
  REGION 1..171: note = MG1-311 HNH domain
DAPRTSRQAQEIKSAQDERGQKRRELFAAHNLEDSGIASKRRRISLWDQQKGVCPYTGKELPKDPLDPALELEHIFPAEMGGLSTDENLVLTWRTVNGDKGKHTPLQFASKLGVPFDQLVAHTKEMRWSGKKREIFAWGTLREAKDDQKSHYLPDGVTLRVPDFGKTTRTA

SEQ ID NO: 3941 - protein, 171 aa, unidentified; identical to SEQ ID NO: 3940
  REGION 1..171: note = Description of Unknown: uncultivated organism
  REGION 1..171: note = MG1-312 HNH domain

SEQ ID NO: 3942 - protein, 172 aa, unidentified; identical to SEQ ID NO: 3937
  REGION 1..172: note = Description of Unknown: uncultivated organism
  REGION 1..172: note = MG1-314 HNH domain

SEQ ID NO: 3943 - protein, 171 aa, unidentified
  REGION 1..171: note = Description of Unknown: uncultivated organism with predicted taxonomy: Verrucomicrobia bacterium
  REGION 1..171: note = MG1-315 HNH domain
DAPRTTKQAQEIKFAQDERGQKRRELFAARNLEDSGVASKRRRISLWDQQKGVCPYTGNELPKDPLDPSLELEHIFPAEMGGLSTDENLVLTSRTVNSDKGKHTPLQFANKLRVPFDQLVAHTQDMRWSAKKREIFAWGTLREDKDDQKSHYLPDGVSLRVPDFGNTTRTA

SEQ ID NO: 3944 - protein, 185 aa, unidentified; identical to SEQ ID NO: 3904
  REGION 1..185: note = Description of Unknown: uncultivated organism with predicted taxonomy: Thiorhodospira sibirica
  REGION 1..185: note = MG1-316 HNH domain

SEQ ID NO: 3945 - protein, 170 aa, unidentified
  REGION 1..170: note = Description of Unknown: uncultivated organism
  REGION 1..170: note = MG1-317 HNH domain
DPPRNALQRAERDQEMKERREKRNKLFEQHHLDDSGVASRRRRVTLWEQQKGKCPFTGKELPANPLDPSLELEHIFPEDMGGLSVEENLALTWRTVNADKGKRTPLQFAAKLGVPFDQLMAHTQEMRWSAKKREIFAWGAIKEDRGDQASHYNPDGALRIPDFGNITRMA

SEQ ID NO: 3946 - protein, 171 aa, unidentified; identical to SEQ ID NO: 3940
  REGION 1..171: note = Description of Unknown: uncultivated organism
  REGION 1..171: note = MG1-318 HNH domain

SEQ ID NO: 3947 - protein, 153 aa, unidentified
  REGION 1..153: note = Description of Unknown: uncultivated organism with predicted taxonomy: Verrucomicrobia bacterium IMCC26134
  REGION 1..153: note = AKC83434.1 HNH domain
TDFMGPKAKLALAKFQSERAEAREDARAQVGKIGADGRASPLKYELWKAQGGICLFVGESLAPTDIESLEIEHIVPRSQGGSDAFINYVVTTKATNKLKDNRTPYAWFEANGFTGWDAYVKRVEACATALRNKKVRLLTAPDAIELVERYTAL

SEQ ID NO: 3948 - protein, 153 aa, unidentified; identical to SEQ ID NO: 3947
  REGION 1..153: note = Description of Unknown: uncultivated organism with predicted taxonomy: Verrucomicrobia bacterium IMCC26134
  REGION 1..153: note = AKC83434.1 HNH domain

SEQ ID NO: 3949 - protein, 151 aa, unidentified
  REGION 1..151: note = Description of Unknown: uncultivated organism with predicted taxonomy: Verrucomicrobia bacterium 61-8
  REGION 1..151: note = OJV06180.1 HNH domain
EDFMGKKAVIEYRAFLKKREAERKRAREDAAKTGSTERSAALKLELLREQGGICLYTGSALKETALEQYEIDHIVPRSKGGPDAVINYVLTLRSANDEKGDRTPFEWLSRTNQWDAYVQRVDSRGTVLRNKKTKLLLNENASELAERYTAL

SEQ ID NO: 3950 - protein, 151 aa, unidentified; identical to SEQ ID NO: 3949
  REGION 1..151: note = Description of Unknown: uncultivated organism with predicted taxonomy: Verrucomicrobia bacterium 61-8
  REGION 1..151: note = OJV06180.1 HNH domain

SEQ ID NO: 3951 - protein, 168 aa, unidentified
  REGION 1..168: note = Description of Unknown: uncultivated organism with predicted taxonomy: Pedosphaera sp. Tous-C6FEB
  REGION 1..168: note = PAW75411.1 HNH domain
EDFMGEKALAELQDFQRRREADRKEAKEMAAAAGATSSLSALKYQLWKAQGGECLYGKEVFNESGVSKAQCLYRGTALPFTKLDDYVIDHIVPRAKGGPDAMVNYVLTTHETNEAKGDRTPFEWLRSAPDWDAYNKRVAARAHTLRNKKVQLLTREDAPELVQRYTAL

SEQ ID NO: 3952 - protein, 168 aa, unidentified; identical to SEQ ID NO: 3951
  REGION 1..168: note = Description of Unknown: uncultivated organism with predicted taxonomy: Pedosphaera sp. Tous-C6FEB
  REGION 1..168: note = PAW75411.1 HNH domain

SEQ ID NO: 3953 - protein, 153 aa, unidentified; identical to SEQ ID NO: 3947
  REGION 1..153: note = Description of Unknown: uncultivated organism with predicted taxonomy: Verrucomicrobia bacterium IMCC26134
  REGION 1..153: note = WP_082083265.1 HNH domain

SEQ ID NO: 3954 - protein, 153 aa, unidentified; identical to SEQ ID NO: 3947
  REGION 1..153: note = Description of Unknown: uncultivated organism with predicted taxonomy: Verrucomicrobia bacterium IMCC26134
  REGION 1..153: note = WP_082083265.1 HNH domain

SEQ ID NO: 3955 - protein, 157 aa, unidentified; identical to SEQ ID NO: 3711
  REGION 1..157: note = Description of Unknown: uncultivated organism
  REGION 1..157: note = MG2-1 HNH domain

SEQ ID NO: 3956 - protein, 185 aa, unidentified
  REGION 1..185: note = Description of Unknown: uncultivated organism
  REGION 1..185: note = MG2-7 HNH domain
ELQEFSGLNSKEITHKLNEKLGNFRSVVKNLEEAIANSEERVAITGSLIRKARILEDQGFVCPYTGTHLSYNHLLADRLEIEHIIPRSLRPSDALSSCVMTFRSVNDMKGQRTAMQFICEEQGREVPGHENIQITTKKAYVDYVAKHKKQYPQKSDDRRRCERRAELMLMERYDQRNADFTERDL

SEQ ID NO: 3957 - protein, 210 aa, unidentified
  REGION 1..210: note = Description of Unknown: uncultivated organism
  REGION 1..210: note = MG2-3 HNH domain
DILTFSGLERKQLSGQVMPSLREHHDHVVRLLQQELKGTQWENKIDGELIWKAKIADDLGWWCPYTGKKYSPCELASGEMDVDHIIPKSRRLTNAMSAVVVTFKTINNLKGDLTAWEFVERYQDQPVGPHGEKVRKLWDYERFVKNPDNEMDKPRLSGETGHSDYPRWPKYLPGSRRKLHPDYVRRKLRRRYLLLKHYEKDKDTFTPRDL

SEQ ID NO: 3958 - protein, 195 aa, unidentified
  REGION 1..195: note = Description of Unknown: uncultivated organism with predicted taxonomy: Verrucomicrobia
  REGION 1..195: note = MG2-5 HNH domain
DLREMSGKSNYDKQADLNNRVKNHHSVVEYLHEHLPAKYHNRINGSLIRKARVAADLDWKCPYTNEAIQPIHLITKVVDLDHVVPHALRPSDGLDSLVVTFCAVNKMKGKRTAWQFIKDEETRSVSYRNEQGKEEKVDGMPNLKIRFFSDYKKFVDDLKIKAKGEHKADAERRERRQQLLRLANYEEKAFLPRDL

SEQ ID NO: 3959 - protein, 179 aa, unidentified
  REGION 1..179: note = Description of Unknown: uncultivated organism with predicted taxonomy: Verrucomicrobia bacterium
  REGION 1..179: note = MG2-6 HNH domain
DLREFSGMTAKEIASELTKITSDHRKAVQYLEENLKGKPYKITASLIRKTRIAMDLDWTCPYTGQKYDIYDLLEKRVDLDHIIPQSIRPSNSLESLVITFPEVNRFKAQRLAFQFVKEEQTKTVKGLPNLQIRTLENYKNWGENLKESRFDRNKSPQSKRKKLLLLPEYVQEEFLPRDL

SEQ ID NO: 3960 - protein, 187 aa, unidentified
  REGION 1..187: note = Description of Unknown: uncultivated organism with predicted taxonomy: Verrucomicrobia
  REGION 1..187: note = MG2-8 HNH domain
DLREMSGKTAKEVAQDLGLRLANFKNVVKKLEGDESFMRELNQRGLHHIPPGIIRKARVAEDLGWRCPYTGMEYEPVHLLTRRVDKDHIIPHADRASDSLDSLVITFSAINAMKGKRTALQFVNEEQGKTVEDLPNLSIVSVNRYREFVEGLEAFRGHDDDRRRKKRRKDLLLLPSYEEKEFTPRDL

SEQ ID NO: 3961 - protein, 187 aa, unidentified; identical to SEQ ID NO: 3960
  REGION 1..187: note = Description of Unknown: uncultivated organism with predicted taxonomy: Verrucomicrobia
  REGION 1..187: note = MG2-10 HNH domain

SEQ ID NO: 3962 - protein, 193 aa, unidentified
  REGION 1..193: note = Description of Unknown: uncultivated organism
  REGION 1..193: note = MG2-11 HNH domain
DLREISGKTAKEKAQELGQRLANFKSVTKKLEEAFEGRNVHISPGLIRKARVAEDLGWTCPYTGQRYDPLDLLNAKVDKDHVIPRTERASDSLDSLVITFPAVNKWKDKRTALKFIEDEQGQPVLDMPNLSIKTFAQYEADVKALRPSFDPRPAKRDGRTKGPIDDDLRRWNRKQLLLNVRKWEEKEFLPRDL

SEQ ID NO: 3963 - protein, 187 aa, unidentified
  REGION 1..187: note = Description of Unknown: uncultivated organism with predicted taxonomy: Verrucomicrobia bacterium
  REGION 1..187: note = MG2-12 HNH domain
DVQTTSGMTNKEKAKELGSKIKHHHETAAWLAERLEDERDENGRRFVIGPSLIRKARIADDLGWECPYTGRKFEPADLIHRRYDKDHIVPRSKRLSDALEAMVITSCEVNREKKNRTALQFIKDMNLPENRAVRERLNIRTEAQFREFVDELKAKGSHADDVRRRKRRKELLLVQKYEEKEFTPADL

SEQ ID NO: 3964 - protein, 180 aa, unidentified
  REGION 1..180: note = Description of Unknown: uncultivated organism with predicted taxonomy: Verrucomicrobia bacterium
  REGION 1..180: note = MG2-13 HNH domain
DLREMSGKTAKEKAQDLGQRLANFKNVAEKLEEAFEGKDVHISPGLIRKARIAEDLGWTCPYTHHSYDAFQLLNRTVDKDHIIPRTERASDSLDSLVITFSAINKWKGKRTAMKFVEDEQGNPVPDMPNLSIVTLTHYKAFVEGLDTFRGHDDDKRRKKNRQRLLLVRDYEKPEFTPRDL

SEQ ID NO: 3965 - protein, 190 aa, unidentified
  REGION 1..190: note = Description of Unknown: uncultivated organism with predicted taxonomy: Verrucomicrobia bacterium
  REGION 1..190: note = MG2-14 HNH domain
DLVQFSGKTAKEKSQILGQQLWHHRKIVSYLEEERENTNGTWDINAGLIKKVRIADDMGWQCPYTGKTYSLNDIIHGEVDREHIIPRSSRPTDALHALTLTFRQINKEKGARTALQYIEDTRGESHTFSPKEFREFVGGLKNKNGPAKDDEVRCKKRKIALLTPIYERRGKVKQTDTGEEVLEAFTDGTL

SEQ ID NO: 3966 - protein, 190 aa, unidentified
  REGION 1..190: note = Description of Unknown: uncultivated organism with predicted taxonomy: Verrucomicrobia bacterium
  REGION 1..190: note = MG2-15 HNH domain
DLVQFSGKTAKEKSQILGQQLWHHRKIVSYLEEERENTNGTWDINAGLIKKVRIADDMGWQCPYTGKTYSLNDIIHGEVDREHIIPRSSRPTDALHALTLTFRQINKEKGARTALQYIEDPRGESHTFSPKEFREFVGRLKNKNGPAKDDEVRCKKRKIALLTPIYERRGKVKQTDTGEEVLEAFTDGTL

SEQ ID NO: 3967 - protein, 197 aa, unidentified
  REGION 1..197: note = Description of Unknown: uncultivated organism with predicted taxonomy: Verrucomicrobia bacterium
  REGION 1..197: note = MG2-16 HNH domain
DLREMSGKTAKEKAQYFRLLTADHHRVAEKLKKALAGQTVDGKPIRISASRIRKARVAEDLNWTCPYTGQKYEPIDLVTERVDEDHIVPRSQRMSDSLESLVISFSAVNKWKGKRTAMRFIKEEQGKPVPGLPNLSIVSLNRYLEFVDSLPPRNDPRKLKRHLKLLQPIDDDLRKWRRKELLKLEEYEQEEFTPRDL

SEQ ID NO: 3968 - protein, 210 aa, unidentified; identical to SEQ ID NO: 3957
  REGION 1..210: note = Description of Unknown: uncultivated organism
  REGION 1..210: note = MG2-17 HNH domain

SEQ ID NO: 3969 - protein, 185 aa, unidentified
  REGION 1..185: note = Description of Unknown: uncultivated organism with predicted taxonomy: Verrucomicrobia
  REGION 1..185: note = MG2-18 HNH domain
DLREFSGKTAKEKAQDLGLRIADHHRVAEKLQKALAGQTLNGQPIRIGPALIRKARIAEDLGWTCPYTGQKYEPIDLVTRRVDKDHIVPRSQRASDSLDSMVITFSAINKWKGKRTALKFVEDEQGKPVPDLPNLSIVSLSRYRDFVEKLDTFKGHDQDKKRKKRRKALLLVRDYEEEEFTPRDL

SEQ ID NO: 3970 - protein, 182 aa, unidentified
  REGION 1..182: note = Description of Unknown: uncultivated organism with predicted taxonomy: Verrucomicrobia
  REGION 1..182: note = MG2-19 HNH domain
DLREFSGMTAKEIESELNARSADFKKAKKQLEDMLLKAGLSNTRITATLIKKARIAQDLDFTCPYTGAKYELIDLINKQVDLEHIIPKSKRPSDSMESLVITFKEVNRWKGNRTALRFIKEEQNKPVQGKGNLMILTEKRYQELVNGLNTKGHPKDTERKKKRKELLLMEDYVEEEFLPRDL

SEQ ID NO: 3971 - protein, 180 aa, unidentified
  REGION 1..180: note = Description of Unknown: uncultivated organism with predicted taxonomy: Verrucomicrobia bacterium
  REGION 1..180: note = MG2-20 HNH domain
ELRDLSGKTRKEQEQDLGLRLGDFKRVAAKVEEACRRRGIPCTAGLIRKARVAEDLGWKCPYTGKEFSVDTLLDGVMDKDHIIPHADRQSDSLDSLVITWNEVNKWKGKRTALEFIREEGGKPVPGRPELTVMTLAEFQKHVASLDIRKGHDDDRARKKRRIRRLLTEYYEEKEFTPRDL

SEQ ID NO: 3972 - protein, 182 aa, unidentified
  REGION 1..182: note = Description of Unknown: uncultivated organism
  REGION 1..182: note = MG2-21 HNH domain
DLREFSGMTAKEIESELNARSADFKKAKKQLENMLQEAGLSNTRITATLIKKARIAQDLDFTCPYTGAKYELIDLINKQVDLEHIIPKSKRPSDSMESLVITFKEVNRWKGNRTALRFIKEEQNKPVPGKENLMILTEKRYQELVNGLNTKGHPKDTERKKKRKELLLMEDYVEEKFLPRDL

SEQ ID NO: 3973 - protein, 210 aa, unidentified; identical to SEQ ID NO: 3957
  REGION 1..210: note = Description of Unknown: uncultivated organism
  REGION 1..210: note = MG2-22 HNH domain

SEQ ID NO: 3974 - protein, 185 aa, unidentified
  REGION 1..185: note = Description of Unknown: uncultivated organism with predicted taxonomy: Verrucomicrobia bacterium
  REGION 1..185: note = MG2-23 HNH domain
DLREFSGKTAKEKTQDLGLRVADHHRVAEKLQKALAGQTVNGQPIRIGPGLIRKARIAEDLGWTCPYTGQKYEPIDLVTRRVDKDHIVPRSQRMSDSLDSLVITFSAINKWKGNRTALKFVEDEQGKPVPDLPNLSIVSLSRYREFVEKLETFKGHDDDKKRKKRRKALLLLRDYEEEEFTPRDL

SEQ ID NO: 3975 - protein, 180 aa, unidentified
  REGION 1..180: note = Description of Unknown: uncultivated organism with predicted taxonomy: Verrucomicrobia bacterium
  REGION 1..180: note = MG2-24 HNH domain
DLRDLSGKTRKEQEQDLGLRLGDFKRVAAKVEEACKRRNLRVTAGIIRKARVAEDLGWRCPYTGKEFCIDTLLDGVMDKEHIIPHADRQSDSLDSLVITWNEVNKWKGKRTAMEFIREEGGKPVPGRPELEIMSLAAFQKHVASLDTRKGHDDDRARKKRRIRRLLTEHYEEKEFTPRDL

SEQ ID NO: 3976 - protein, 185 aa, unidentified
  REGION 1..185: note = Description of Unknown: uncultivated organism
  REGION 1..185: note = MG2-25 HNH domain
DLREFSGMTRKAIEMDLGSRLKNFKSVSDKLEKAFDSQTYNGKPVQVTAGLIRKARIAEDLGWQCPYTGQSFEPVHLVSRAVDKDHVIPRSQRPSDSLESLVVTFSEVNKMKGQRTAWQFIQEFGGKPVEGMPNLMIRTPKQFEEFVTKLESFKGHEDDKRRKKRRKDLLLLPKFEDKGFVPRDL

SEQ ID NO: 3977 - protein, 180 aa, unidentified
  REGION 1..180: note = Description of Unknown: uncultivated organism with predicted taxonomy: Verrucomicrobia bacterium
  REGION 1..180: note = MG2-26 HNH domain
DLRELSGKTRKEQEQDLGQRLANFKSVVRKLEESFDGKKVKITPGLIRKARVAEDLGWTCPYTGKAYDAFDLLNRAVDKDHIIPRSQRASDSLDSLVITFAEVNKMKGKRTALRFIEEFQGQPVPGAPRLSLRTLRDYQQWVEGLETFKGHPDDQRRKKQRKKLLLLPEYVEKDFVPRDL

SEQ ID NO: 3978 - protein, 181 aa, unidentified
  REGION 1..181: note = Description of Unknown: uncultivated organism
  REGION 1..181: note = MG2-27 HNH domain
DLRSFSGMTAEEKKQEMGQRLGDFKKVVQKLRGDLPEVTAISAGLIRKARIAQDMNWTCPYTGMEYDALDLLHGHVDKDHIIPRSLRPSDSLDSLVLTLRTINEMKGQRTAVQFIKEFEGREVQDGKKRSLEILPWSQFQKLVESLDAKGIHDQDRARKKRRKALLLQEHYTEKEFVPKDL

SEQ ID NO: 3979 - protein, 180 aa, unidentified
  REGION 1..180: note = Description of Unknown: uncultivated organism with predicted taxonomy: Verrucomicrobia
  REGION 1..180: note = MG2-28 HNH domain
DLREMAGRTSQEIAKELGARVANHKKVANRLFGELPEGTRITGSLIRKARIADDLGWRCPYTGVEFEPVDLVEGRVDRDHIIPRSQRMSDSLDSLVITFSAVNKWKGQRTAWQFIQEEGGKPVPDAPNLSIVTPARFRDFVEHLDTKGHRDDYRRKKRRKELLLLERYEERTSGFTPGQL

SEQ ID NO: 3980 - protein, 182 aa, unidentified
  REGION 1..182: note = Description of Unknown: uncultivated organism with predicted taxonomy: Verrucomicrobia bacterium
  REGION 1..182: note = MG2-29 HNH domain
EVSSMSGKTMKLIKMEEGLKRSDHKKASKIMEAAVEESGENIRVGAGLIRKARVAQDLDWTCPYTGEKFDPLALIHSQVDLDHIIPRSERLSDAMAGLVVTFSEINRWKGARTAYQFISEEQGKQVPGKPNLSIMSLKAYEDFVGKLKISGGHDSDVGRRKARKGYLLLASYQDKEFTPRDL

SEQ ID NO: 3981 - protein, 182 aa, unidentified
  REGION 1..182: note = Description of Unknown: uncultivated organism with predicted taxonomy: Verrucomicrobia bacterium
  REGION 1..182: note = MG2-30 HNH domain
EISELSGKTTKEIKKEEGLKRAEHKKAREKMEAAVKDSGENIVITAGLIRKARIAQDLNWTCPFTGKEYDPIDLIHKQVDLDHIIPRAERLSDSMGGLVVTFSEVNRMKGKRTAWQFIQDEQGKPVKGKPVLSIRTMKNYETFVSKLKTFGGVKSDEARRKMRKQFLLMPDYKEKGFTPRDL

SEQ ID NO: 3982 - protein, 182 aa, unidentified; identical to SEQ ID NO: 3981
  REGION 1..182: note = Description of Unknown: uncultivated organism with predicted taxonomy: Verrucomicrobia bacterium
  REGION 1..182: note = MG2-31 HNH domain

SEQ ID NO: 3983 - protein, 182 aa, unidentified; identical to SEQ ID NO: 3981
  REGION 1..182: note = Description of Unknown: uncultivated organism with predicted taxonomy: Verrucomicrobia bacterium
  REGION 1..182: note = MG2-32 HNH domain

SEQ ID NO: 3984 - protein, 182 aa, unidentified; identical to SEQ ID NO: 3981
  REGION 1..182: note = Description of Unknown: uncultivated organism with predicted taxonomy: Verrucomicrobia bacterium
  REGION 1..182: note = MG2-33 HNH domain

SEQ ID NO: 3985 - protein, 182 aa, unidentified; identical to SEQ ID NO: 3981
  REGION 1..182: note = Description of Unknown: uncultivated organism with predicted taxonomy: Verrucomicrobia bacterium
  REGION 1..182: note = MG2-34 HNH domain

SEQ ID NO: 3986 - protein, 188 aa, unidentified
  REGION 1..188: note = Description of Unknown: uncultivated organism with predicted taxonomy: Thermogutta terrifontis
  REGION 1..188: note = MG2-35 HNH domain
DLVEFSGKSAKEKARILGQQLWHHRKISKFLEEEKAKNEGNWEISAGLIKKARIADDLNWICPYTGKQYSLNQIIHGDVDLEHIIPRSKRPTDALHALVLTFSHINREKGARTGLQYIEDTKDSPHTLTPEQYRKFVGRLKKNGPSKDDELRCTKRKIALLTQDYEPRGKAKEKSDSESVSGFTEGSL

SEQ ID NO: 3987 - protein, 183 aa, unidentified
  REGION 1..183: note = Description of Unknown: uncultivated organism with predicted taxonomy: Coraliomargarita sp. CAG:312
  REGION 1..183: note = MG2-36 HNH domain
DITAFSGLDSKKKAAKLNDLVAHHKSVSAYLKKEYPELSPNGSILRKARIADDLGWVCPYTGCHFSPRQLFESGNMEREHIIPRSLRPSDSLESLVITWKEVNDMKGQRTAYEFIKECQGMKVPGRQNLSIVTPERFEAFVRRLKKPMHPAGKADIERIKIRNKLLLTEHYKKREGGFLPSDL

SEQ ID NO: 3988 - protein, 183 aa, unidentified
  REGION 1..183: note = Description of Unknown: uncultivated organism with predicted taxonomy: Coraliomargarita sp. CAG:312
  REGION 1..183: note = MG2-37 HNH domain
DMGEFSGLDPKERAAKLNDLVCHHKSVSEYLEETYPELKISGSIIRKARIADDLGWVCPYTGRHFSPRELFESGNMELDHIIPYSLRPSNSLESLVATWKAVNEMKGQRCAAEFIKECQGMEVPGMPNVSIVTPERFEKFVSGLKKPQHNARYPDLKRIKKRNKLLLTLKYNKREGEFLPADL

SEQ ID NO: 3989 - protein, 183 aa, unidentified; identical to SEQ ID NO: 3987
  REGION 1..183: note = Description of Unknown: uncultivated organism with predicted taxonomy: Coraliomargarita sp. CAG:312
  REGION 1..183: note = MG2-38 HNH domain

SEQ ID NO: 3990 - protein, 183 aa, unidentified; identical to SEQ ID NO: 3988
  REGION 1..183: note = Description of Unknown: uncultivated organism with predicted taxonomy: Verrucomicrobia bacterium
  REGION 1..183: note = MG2-39 HNH domain

SEQ ID NO: 3991 - protein, 183 aa, unidentified; identical to SEQ ID NO: 3987
  REGION 1..183: note = Description of Unknown: uncultivated organism with predicted taxonomy: Coraliomargarita sp. CAG:312
  REGION 1..183: note = MG2-40 HNH domain

SEQ ID NO: 3992 - protein, 183 aa, unidentified; identical to SEQ ID NO: 3988
  REGION 1..183: note = Description of Unknown: uncultivated organism with predicted taxonomy: Coraliomargarita sp. CAG:312
  REGION 1..183: note = MG2-41 HNH domain

SEQ ID NO: 3993 - protein, 183 aa, unidentified; identical to SEQ ID NO: 3988
  REGION 1..183: note = Description of Unknown: uncultivated organism with predicted taxonomy: Coraliomargarita sp. CAG:312
  REGION 1..183: note = MG2-42 HNH domain

SEQ ID NO: 3994 - protein, 183 aa, unidentified; identical to SEQ ID NO: 3988
  REGION 1..183: note = Description of Unknown: uncultivated organism with predicted taxonomy: Verrucomicrobia
  REGION 1..183: note = MG2-43 HNH domain

SEQ ID NO: 3995 - protein, 183 aa, unidentified; identical to SEQ ID NO: 3987
  REGION 1..183: note = Description of Unknown: uncultivated organism with predicted taxonomy: Coraliomargarita sp. CAG:312
  REGION 1..183: note = MG2-44 HNH domain

SEQ ID NO: 3996 - protein, 183 aa, unidentified; identical to SEQ ID NO: 3988
  REGION 1..183: note = Description of Unknown: uncultivated organism with predicted taxonomy: Coraliomargarita sp. CAG:312
  REGION 1..183: note = MG2-45 HNH domain

SEQ ID NO: 3997 - protein, 183 aa, unidentified; identical to SEQ ID NO: 3987
  REGION 1..183: note = Description of Unknown: uncultivated organism with predicted taxonomy: Coraliomargarita sp. CAG:312
  REGION 1..183: note = MG2-46 HNH domain

SEQ ID NO: 3998 - protein, 183 aa, unidentified; identical to SEQ ID NO: 3988
  REGION 1..183: note = Description of Unknown: uncultivated organism with predicted taxonomy: Verrucomicrobia bacterium
  REGION 1..183: note = MG2-47 HNH domain

SEQ ID NO: 3999 - protein, 183 aa, unidentified
  REGION 1..183: note = Description of Unknown: uncultivated organism with predicted taxonomy: Coraliomargarita sp. CAG:312
  REGION 1..183: note = MG2-48 HNH domain
DITAFSGLDSKKKAAKLNDLVAHHKSVSAYLKKEYPEISPNGSILRKARIADDLGWVCPYTGCHFSPRQLFESGNMEREHIIPRSLRPSDSLESLVITWKEVNDMKGQCTAYEFIKECQGMKVPGRQNLSIVTPERFEAFVRRLKKPMHPAGKADIERIKIRNKLLLTEHYKKREGGFLPSDL

SEQ ID NO: 4000 - protein, 183 aa, unidentified; identical to SEQ ID NO: 3988
  REGION 1..183: note = Description of Unknown: uncultivated organism with predicted taxonomy: Coraliomargarita sp. CAG:312
  REGION 1..183: note = MG2-49 HNH domain

SEQ ID NO: 4001 - protein, 183 aa, unidentified; identical to SEQ ID NO: 3987
  REGION 1..183: note = Description of Unknown: uncultivated organism with predicted taxonomy: Coraliomargarita sp. CAG:312
  REGION 1..183: note = MG2-50 HNH domain

SEQ ID NO: 4002 - protein, 183 aa, unidentified; identical to SEQ ID NO: 3987
  REGION 1..183: note = Description of Unknown: uncultivated organism with predicted taxonomy: Coraliomargarita sp. CAG:312
  REGION 1..183: note = MG2-51 HNH domain

SEQ ID NO: 4003 - protein, 183 aa, unidentified; identical to SEQ ID NO: 3988
  REGION 1..183: note = Description of Unknown: uncultivated organism with predicted taxonomy: Verrucomicrobia bacterium
  REGION 1..183: note = MG2-52 HNH domain

SEQ ID NO: 4004 - protein, 183 aa, unidentified; identical to SEQ ID NO: 3988
  REGION 1..183: note = Description of Unknown: uncultivated organism with predicted taxonomy: Verrucomicrobia bacterium
  REGION 1..183: note = MG2-53 HNH domain

SEQ ID NO: 4005 - protein, 183 aa, unidentified
  REGION 1..183: note = Description of Unknown: uncultivated organism with predicted taxonomy: Coraliomargarita sp. CAG:312
  REGION 1..183: note = MG2-54 HNH domain
DMTAFSGLDSKKKAAKLKDLVAHHESVSKYLKNEYPNLKTNGSILRKARIADDLGWVCPYTGCHFSPRQLFESGNMEKEHIIPRSLRPSDSLESLVVTWKEVNDMKGQRTALEFIKECQGMKVPGRPNLSIVTPARFEEFVSGLRKPMHRAGKADIERIKIRNKLLLTEHYKNREGEFLPSDL

SEQ ID NO: 4006 - protein, 183 aa, unidentified; identical to SEQ ID NO: 3987
  REGION 1..183: note = Description of Unknown: uncultivated organism with predicted taxonomy: Coraliomargarita sp. CAG:312
  REGION 1..183: note = MG2-55 HNH domain

SEQ ID NO: 4007 - protein, 183 aa, unidentified; identical to SEQ ID NO: 3987
  REGION 1..183: note = Description of Unknown: uncultivated organism with predicted taxonomy: Coraliomargarita sp. CAG:312
  REGION 1..183: note = MG2-56 HNH domain

SEQ ID NO: 4008 - protein, 183 aa, unidentified; identical to SEQ ID NO: 3988
  REGION 1..183: note = Description of Unknown: uncultivated organism with predicted taxonomy: Coraliomargarita sp. CAG:312
  REGION 1..183: note = MG2-57 HNH domain

SEQ ID NO: 4009 - protein, 183 aa, unidentified; identical to SEQ ID NO: 3988
  REGION 1..183: note = Description of Unknown: uncultivated organism with predicted taxonomy: Verrucomicrobia bacterium
  REGION 1..183: note = MG2-58 HNH domain

SEQ ID NO: 4010 - protein, 183 aa, unidentified; identical to SEQ ID NO: 3987
  REGION 1..183: note = Description of Unknown: uncultivated organism with predicted taxonomy: Coraliomargarita sp. CAG:312
  REGION 1..183: note = MG2-59 HNH domain

SEQ ID NO: 4011 - protein, 183 aa, unidentified; identical to SEQ ID NO: 3987
  REGION 1..183: note = Description of Unknown: uncultivated organism with predicted taxonomy: Coraliomargarita sp. CAG:312
  REGION 1..183: note = MG2-60 HNH domain

SEQ ID NO: 4012 - protein, 183 aa, unidentified; identical to SEQ ID NO: 3987
  REGION 1..183: note = Description of Unknown: uncultivated organism with predicted taxonomy: Coraliomargarita sp. CAG:312
  REGION 1..183: note = MG2-61 HNH domain

SEQ ID NO: 4013 - protein, 185 aa, unidentified
  REGION 1..185: note = Description of Unknown: uncultivated organism with predicted taxonomy: Verrucomicrobia
  REGION 1..185: note = MG2-62 HNH domain
ELKEFSGLSAQEIATKLNEKFANFNSVAEKIEAAAQEKGVSVSASLIRKARLLEDQGFACPYTGKNISYNELFSGALEIEHIIPRSLRPSDALSSCVMTFRAVNDMKGQRTAMQFMKECAGKDVPGTNLQIQPLANFKEWVEAHRSQKLRRGFSKEDQARCKRRAELLLVERYEERNADFTERDL

SEQ ID NO: 4014 - protein, 183 aa, unidentified; identical to SEQ ID NO: 3987
  REGION 1..183: note = Description of Unknown: uncultivated organism with predicted taxonomy: Coraliomargarita sp. CAG:312
  REGION 1..183: note = MG2-63 HNH domain

SEQ ID NO: 4015 - protein, 183 aa, unidentified; identical to SEQ ID NO: 3987
  REGION 1..183: note = Description of Unknown: uncultivated organism with predicted taxonomy: Coraliomargarita sp. CAG:312
  REGION 1..183: note = MG2-64 HNH domain

SEQ ID NO: 4016 - protein, 183 aa, unidentified; identical to SEQ ID NO: 3988
  REGION 1..183: note = Description of Unknown: uncultivated organism with predicted taxonomy: Coraliomargarita sp. CAG:312
  REGION 1..183: note = MG2-65 HNH domain

SEQ ID NO: 4017 - protein, 183 aa, unidentified; identical to SEQ ID NO: 3987
  REGION 1..183: note = Description of Unknown: uncultivated organism with predicted taxonomy: Coraliomargarita sp. CAG:312
  REGION 1..183: note = MG2-66 HNH domain

SEQ ID NO: 4018 - protein, 183 aa, unidentified; identical to SEQ ID NO: 3987
  REGION 1..183: note = Description of Unknown: uncultivated organism with predicted taxonomy: Coraliomargarita sp. CAG:312
  REGION 1..183: note = MG2-67 HNH domain

SEQ ID NO: 4019 - protein, 183 aa, unidentified; identical to SEQ ID NO: 3999
  REGION 1..183: note = Description of Unknown: uncultivated organism with predicted taxonomy: Coraliomargarita sp. CAG:312
  REGION 1..183: note = MG2-68 HNH domain

SEQ ID NO: 4020 - protein, 183 aa, unidentified; identical to SEQ ID NO: 3987
  REGION 1..183: note = Description of Unknown: uncultivated organism with predicted taxonomy: Coraliomargarita sp. CAG:312
  REGION 1..183: note = MG2-69 HNH domain

SEQ ID NO: 4021 - protein, 183 aa, unidentified; identical to SEQ ID NO: 3987
  REGION 1..183: note = Description of Unknown: uncultivated organism with predicted taxonomy: Coraliomargarita sp. CAG:312
  REGION 1..183: note = MG2-70 HNH domain

SEQ ID NO: 4022 - protein, 183 aa, unidentified; identical to SEQ ID NO: 3987
  REGION 1..183: note = Description of Unknown: uncultivated organism with predicted taxonomy: Coraliomargarita sp. CAG:312
  REGION 1..183: note = MG2-71 HNH domain

SEQ ID NO: 4023 - protein, 183 aa, unidentified; identical to SEQ ID NO: 3987
  REGION 1..183: note = Description of Unknown: uncultivated organism with predicted taxonomy: Coraliomargarita sp. CAG:312
  REGION 1..183: note = MG2-72 HNH domain

SEQ ID NO: 4024 - protein, 183 aa, unidentified; identical to SEQ ID NO: 3988
  REGION 1..183: note = Description of Unknown: uncultivated organism with predicted taxonomy: Verrucomicrobia bacterium
  REGION 1..183: note = MG2-73 HNH domain

SEQ ID NO: 4025 - protein, 185 aa, unidentified; identical to SEQ ID NO: 4013
  REGION 1..185: note = Description of Unknown: uncultivated organism with predicted taxonomy: Verrucomicrobia
  REGION 1..185: note = MG2-74 HNH domain

SEQ ID NO: 4026 - protein, 183 aa, unidentified; identical to SEQ ID NO: 3987
  REGION 1..183: note = Description of Unknown: uncultivated organism with predicted taxonomy: Coraliomargarita sp. CAG:312
  REGION 1..183: note = MG2-75 HNH domain

SEQ ID NO: 4027 - protein, 193 aa, unidentified
  REGION 1..193: note = Description of Unknown: uncultivated organism with predicted taxonomy: Verrucomicrobia bacterium
  REGION 1..193: note = MG2-76 HNH domain
DLREMSGKTAKEKAQDLGLRLANFKSVVKKLEEAFEGKQIRITPGLIRKARIAEDIGWVCPYTGEHYDAFDLLHKNVDLDHIIPRADRPSNSLDSLVVTFPEVNRMKGKRTALAFMKEAETKQVEGLPRLTLKSLNHFKADIEALRPGSDPRKAKRRGAVTGPIDDDLRRWKRKELLLKVEKWDGGDFLPADL

SEQ ID NO: 4028 - protein, 193 aa, unidentified; identical to SEQ ID NO: 4027
  REGION 1..193: note = Description of Unknown: uncultivated organism
  REGION 1..193: note = MG2-77 HNH domain

SEQ ID NO: 4029 - protein, 193 aa, unidentified; identical to SEQ ID NO: 4027
  REGION 1..193: note = Description of Unknown: uncultivated organism with predicted taxonomy: Verrucomicrobia bacterium
  REGION 1..193: note = MG2-78 HNH domain

SEQ ID NO: 4030 - protein, 184 aa, unidentified
  REGION 1..184: note = Description of Unknown: uncultivated organism with predicted taxonomy: Verrucomicrobia bacterium
  REGION 1..184: note = MG2-79 HNH domain
DLREMSGKTAKEKAQDLGLRIANHHAVAEKLEKAFAEERNGKSIPITAGLIRKARIAEDLGWRCPYTGIDYEPKDLVTKRVDKDHIVPRSERASDSLDSLVITLSAINKWKGKRTAWQFVEQEQGKPVPDLPNLSIVSLTRYKQFVESLETYKGHDDDKRRKKKRKELMLLPKYEEREFVPRDL

SEQ ID NO: 4031 - protein, 193 aa, unidentified; identical to SEQ ID NO: 4027
  REGION 1..193: note = Description of Unknown: uncultivated organism with predicted taxonomy: Verrucomicrobia bacterium
  REGION 1..193: note = MG2-80 HNH domain

SEQ ID NO: 4032 - protein, 185 aa, unidentified
  REGION 1..185: note = Description of Unknown: uncultivated organism with predicted taxonomy: Verrucomicrobia bacterium
  REGION 1..185: note = MG2-81 HNH domain
DLREMSGKSAKEIQQDLGRRLANHHGVAAKLDADLDGRTFNGKPIQITAGLIRKARIAEDLGWTCPYTGKTYDAIDLVSRQVDKDHIIPRSLRPSDSLDSLVVTFAEVNKMKGQRTAWKFVSDEQGKVVEGSPQLSIVSLTRFKQWAESLETYKGHDDDKRRKKKRKELLLLPNYEEKGFVPRDL

SEQ ID NO: 4033 - protein, 193 aa, unidentified; identical to SEQ ID NO: 4027
  REGION 1..193: note = Description of Unknown: uncultivated organism with predicted taxonomy: Verrucomicrobia bacterium
  REGION 1..193: note = MG2-82 HNH domain

SEQ ID NO: 4034 - protein, 182 aa, unidentified
  REGION 1..182: note = Description of Unknown: uncultivated organism
  REGION 1..182: note = MG2-83 HNH domain
DLREMSGKTAKEKAQDLGLRIANHHNVAEKLEKAFAEEGIKQTITAGLIRKARIAEDLGWHCPYTGIQYEPKDLITRRVDKDHIVPRSERASDSLDSLVVTFSAINKWKNKRTAWQFVTDEQGKTVPDLPNLSIMSLARYKQFVESLESYKGHDDDKRRKKKRKELMLLPKYEEKEFMPRDL

SEQ ID NO: 4035 - protein, 187 aa, unidentified; identical to SEQ ID NO: 3960
  REGION 1..187: note = Description of Unknown: uncultivated organism with predicted taxonomy: Verrucomicrobia bacterium
  REGION 1..187: note = MG2-84 HNH domain

SEQ ID NO: 4036 - protein, 193 aa, unidentified; identical to SEQ ID NO: 4027
  REGION 1..193: note = Description of Unknown: uncultivated organism with predicted taxonomy: Verrucomicrobia bacterium
  REGION 1..193: note = MG2-85 HNH domain

SEQ ID NO: 4037 - protein, 187 aa, unidentified; identical to SEQ ID NO: 3960
  REGION 1..187: note = Description of Unknown: uncultivated organism
  REGION 1..187: note = MG2-86 HNH domain

SEQ ID NO: 4038 - protein, 187 aa, unidentified; identical to SEQ ID NO: 3960
  REGION 1..187: note = Description of Unknown: uncultivated organism with predicted taxonomy: Methylococcales bacterium
  REGION 1..187: note = MG2-87 HNH domain

SEQ ID NO: 4039 - protein, 187 aa, unidentified; identical to SEQ ID NO: 3960
  REGION 1..187: note = Description of Unknown: uncultivated organism
  REGION 1..187: note = MG2-88 HNH domain

SEQ ID NO: 4040 - protein, 187 aa, unidentified; identical to SEQ ID NO: 3960
  REGION 1..187: note = Description of Unknown: uncultivated organism with predicted taxonomy: Verrucomicrobia
  REGION 1..187: note = MG2-89 HNH domain

SEQ ID NO: 4041 - protein, 182 aa, unidentified; identical to SEQ ID NO: 4034
  REGION 1..182: note = Description of Unknown: uncultivated organism with predicted taxonomy: Verrucomicrobia bacterium
  REGION 1..182: note = MG2-90 HNH domain

SEQ ID NO: 4042 - protein, 182 aa, unidentified; identical to SEQ ID NO: 4034
  REGION 1..182: note = Description of Unknown: uncultivated organism
  REGION 1..182: note = MG2-91 HNH domain

SEQ ID NO: 4043 - protein, 185 aa, unidentified
  REGION 1..185: note = Description of Unknown: uncultivated organism with predicted taxonomy: Verrucomicrobiae bacterium Tous-C5FEB
  REGION 1..185: note = MG2-92 HNH domain
DLREMSGKSSKEIQQDLGRRLANHHGVAAKLEKDLDGRTFNGKPIQITAGLIRKARIAEDLSWMCPYTSKAFDAIDLVSRQVDKDHIIPRSLRPSDSLDSLVVTFAEVNKMKGQRTALQFVSDEQGKTVEGSPQLSIVSLTRFKQWAESLETYKGHDDDKRRKKKRKELLLLQTYEEKGFVPRDL

SEQ ID NO: 4044 - protein, 185 aa, unidentified
  REGION 1..185: note = Description of Unknown: uncultivated organism
  REGION 1..185: note = MG2-94 HNH domain
ELQEFSGLNAKEVAQKLNEKLGNFRAVVKGLEEAIRGSGEKVAITGSLIRKARILEDQGFICPYTGAPLGYPDLLNDRLEIEHVIPRSLRPSDALSSCVMTFRSVNDMKGQRTAMQFIGEEQGREVPGHGNLQITTKKAYEAYVAKHKKQYRYGTDDRRRCERRAELMLMERYDQRNADFTERDL

SEQ ID NO: 4045 - protein, 185 aa, unidentified; identical to SEQ ID NO: 4044
  REGION 1..185: note = Description of Unknown: uncultivated organism
  REGION 1..185: note = MG2-95 HNH domain

SEQ ID NO: 4046 - protein, 185 aa, unidentified; identical to SEQ ID NO: 3956
  REGION 1..185: note = Description of Unknown: uncultivated organism
  REGION 1..185: note = MG2-96 HNH domain

SEQ ID NO: 4047 - protein, 185 aa, unidentified
  REGION 1..185: note = Description of Unknown: uncultivated organism with predicted taxonomy: Acidobacteria bacterium RIFCSPLOWO2_12_FULL_68_19
  REGION 1..185: note = MG2-97 HNH domain
ELQEFSGLNAKEVAQKLNEKLGNFRAVVKGLEEAIRGSGEKVAITGSLIRKARILEDQGFICPYTGAPLGYPDLLNDRLEIEHVIPRSLRPSDALSSCVMTFRSVNDMKGQRTAMQFIGEEQGREVPGHGNLQITTKKAFEAYVAKHTKQYRYGTDDRRRCERRAELMLMERYDQRNADFTERDL

SEQ ID NO: 4048 - protein, 186 aa, unidentified
  REGION 1..186: note = Description of Unknown: uncultivated organism with predicted taxonomy: Verrucomicrobia bacterium
  REGION 1..186: note = MG2-98 HNH domain
DLRTMSGMTAKERETEMKKRLSNFTSAKIALEKALTGKKIGGKPIPITAGLIRKARLAMDLDMTCPYTGQIYDFIDIAKGRMQRDHVIPYAERASDSLAAQVLTFAEVNKWKDKRTAAQFVREEQGKAVKGKPNLVVLPFEKYKAFVEGLDKGKHPHPDDKARKEKRKKLLLLEEYAEKEFLPADL

SEQ ID NO: 4049 - protein, 185 aa, unidentified; identical to SEQ ID NO: 3956
  REGION 1..185: note = Description of Unknown: uncultivated organism
  REGION 1..185: note = MG2-99 HNH domain

SEQ ID NO: 4050 - protein, 187 aa, unidentified
  REGION 1..187: note = Description of Unknown: uncultivated organism with predicted taxonomy: Proteobacteria
  REGION 1..187: note = MG2-100 HNH domain
ELQEFSGLNAKEVAQKLNEKLGNFRAVVKGLEEAIRGSGEKVAITGSLIRKARILEDQGFICPYTGAPLGYPDLLNDRLEIEHVIPRSLRPSDALSSCVMTFRSVNDMKGQRTAMQFICDCEKHGRDVPGHGNLQITTKKAYEAYVAKHKKQYRYGTDDRRRCERRAELMLMERYDQRNADFTERDL

SEQ ID NO: 4051 - protein, 185 aa, unidentified; identical to SEQ ID NO: 4044
  REGION 1..185: note = Description of Unknown: uncultivated organism with predicted taxonomy: Bradyrhizobium
  REGION 1..185: note = MG2-101 HNH domain

SEQ ID NO: 4052 - protein, 184 aa, unidentified
  REGION 1..184: note = Description of Unknown: uncultivated organism with predicted taxonomy: Methylococcales bacterium
  REGION 1..184: note = MG2-102 HNH domain
DLREMSGKTAKEKAQDLGLRIANHHAVAEKLEKAFAEERNGKSIRITAGLIRKARIADDLGWKCPYTGQPYEPKHLITRFVDKDHIVPRSDRASDSLDSLVITFSAINKWKGKRTAWQFVSEEQGKPVPDLPNFSILSLARYKQFVETLETYKGHDDDKRRKKKRKELMLLPKYEEKEFVPGDL

SEQ ID NO: 4053 - protein, 182 aa, unidentified
  REGION 1..182: note = Description of Unknown: uncultivated organism with predicted taxonomy: Verrucomicrobia bacterium
  REGION 1..182: note = MG2-103 HNH domain
DLREMSGKTAKEKAQDLGLRIANHHAVSDKLEKAFAEEGKRTPITAGLIRKARIADDLGWKCPYTGQDYEPKQLVSRYVDKDHIVPRSQRASDSLDSLVITFGAINKWKGNRTAWQFVEQEQSKPVPDLPNLSILTLTRYKQFVESLETYKGHDDDKRRKKRRKDLLLLPKYEEKTFVPRDL

SEQ ID NO: 4054 - protein, 180 aa, unidentified
  REGION 1..180: note = Description of Unknown: uncultivated organism with predicted taxonomy: Verrucomicrobia bacterium
  REGION 1..180: note = MG2-104 HNH domain
ELRDLSGKTRKEQEKDLGIRLKDFKDVAKKVEDACKRRGVSITAGIIRKARVAEDLGWKCPYTGKAFEIDALLGDTMDKDHIIPHADRQSDSLDSLVMTWKEVNTWKGKRTAMQFIREEGGKTVPGRPELSIMPLEPFKKHVASLDTRKGHNDDKARKKRRVQRLLTENYEEKEFTPRDL

SEQ ID NO: 4055 - protein, 180 aa, unidentified; identical to SEQ ID NO: 4054
  REGION 1..180: note = Description of Unknown: uncultivated organism with predicted taxonomy: Verrucomicrobia bacterium
  REGION 1..180: note = MG2-105 HNH domain

SEQ ID NO: 4056 - protein, 155 aa, unidentified
  REGION 1..155: note = Description of Unknown: uncultivated organism with predicted taxonomy: Rothia
  REGION 1..155: note = MG3-6 HNH domain
TGLMGPTQRQKILNEQKKNRADNERIRDELRESGVDNPSRAEVRRHLIVQEQECQCLYCGTMITTTTSELDHIVPRAGGGSSRRENLAAVCRACNAKKKRELFYAWAGPVKSQETIERVRQLKAFKDSKKAKMFKNQIRRLNQTEADEPIDERSL

SEQ ID NO: 4057 - protein, 159 aa, unidentified
  REGION 1..159: note = Description of Unknown: uncultivated organism with predicted taxonomy: Rothia
  REGION 1..159: note = MG3-7 HNH domain
TGLMGPAQRADVLNEIAKNRKKNDKIREDLRAGGINNPTRADIRRNAIVQDQESQCLYCGATIGVSYSELDHIVPRAGGGSSRRENLAAVCRACNDSKKDTPFAVWAKNTSRPVTLEGTIQRLRELKAFKRPKDRRMVDLIIRRLKQTEKDDPIDERSL

SEQ ID NO: 4058 - protein, 155 aa, unidentified
  REGION 1..155: note = Description of Unknown: uncultivated organism with predicted taxonomy: Rothia
  REGION 1..155: note = MG3-8 HNH domain
IGLVGPAQRQNILKEQEDNRKNNECIRDELRKSGVENPSRTEVRRHLVVQDQESQCLYCGAVIRTDTSELDHIVPRAGGGSSRRENLAAVCRYCNSKKDRTLFYDWAGSVRLQETIDRVRQLKAFKDSKKAKMFKNQIRRLRQTEADEPIDERSL

SEQ ID NO: 4059 - protein, 156 aa, unidentified
  REGION 1..156: note = Description of Unknown: uncultivated organism with predicted taxonomy: Dermabacter hominis
  REGION 1..156: note = MG3-1 HNH domain
TGLMGAEQRSSIIAENNRNRRDSDRIRAELQADGLSEPSRLDVRRHRQVQRQNCTCLYCGTPITTTTSELDHIVPRRGGGSSQGSNLVAVCRECNASKAHRIFAEWAEDSQREGVSVKEAAKRVRHWLNASASMKREVTRRLQQKRTDPPIDERDL

SEQ ID NO: 4060 - protein, 163 aa, unidentified
  REGION 1..163: note = Description of Unknown: uncultivated organism with predicted taxonomy: Micrococcales
  REGION 1..163: note = MG3-5 HNH domain
TGLMGPAQRAEVLREMASGRRKNDRIRQELRTSGIDEPNLSDVKRHRKIQMQGGVCLYCGTDITSATAELDHIVPRAGGGNSTSTNLVAVCRVCNAAKGRRTFPEFASSDTRDAVSLEAAVERVKLWIDDKGIKNIGESRYARDVIRRLKQSTQDEPIDERSL

SEQ ID NO: 4061 - protein, 155 aa, unidentified
  REGION 1..155: note = Description of Unknown: uncultivated organism with predicted taxonomy: Rothia
  REGION 1..155: note = MG3-6 HNH domain
TGLMGPSQRADVLKEIARNRNANERIRQELREGGIEAPNRADIRRNSIIQDQESQCLYCGKEIGVLTAELDHIVPRAGGGSSKRENLAAVCRACNASKGSRPFAVWAGPARLERTIQRLRELQAFKTKSKKRTLNAIIRRLKQREEDEPIDERSL

SEQ ID NO: 4062 - protein, 155 aa, unidentified
  REGION 1..155: note = Description of Unknown: uncultivated organism with predicted taxonomy: Rothia
  REGION 1..155: note = MG3-7 HNH domain
TGLVGPAQRQEILNEQKKNRENNELIRGDLRKSGVENPSRAEVRRHLIVQEQESQCLYCGAVIRTDTSELDHIVPRAGGGSSRRENMAAVCHYCNSKKKRTLFYDWAGPVKLQETVDRVRQLEAFKDSKKAKMFKNQIRRLKQTEADVPIDERSL

SEQ ID NO: 4063 - protein, 155 aa, unidentified; identical to SEQ ID NO: 4058
  REGION 1..155: note = Description of Unknown: uncultivated organism with predicted taxonomy: Rothia
  REGION 1..155: note = MG3-8 HNH domain

SEQ ID NO: 4064 - protein, 162 aa, unidentified
  REGION 1..162: note = Description of Unknown: uncultivated organism with predicted taxonomy: Brevibacterium
  REGION 1..162: note = MG3-42 HNH domain
SSLLGPAARAEYQREVNANRRARERSLESLREQGVADPTVATVRRFSAVQHQNGVCLYCGSAITAKPGDSGCELDHVVPRSGGGSSKRENLVAACRRCNSEKGNLPFSLWAAESTRPEVSVEAALTRLQNFNWERRDRAVKKGLIRRLKQTSEDEPIDERSL

SEQ ID NO: 4065 - protein, 162 aa, unidentified
  REGION 1..162: note = Description of Unknown: uncultivated organism with predicted taxonomy: Brevibacterium mcbrellneri
  REGION 1..162: note = MG3-68 HNH domain
SSLLGPAARAEYQREVNANRRARERSIESLREQGVADPTVATVRRFSAVQHQNGVCLYCGSTITAKPGDSGCELDHVVPRSGGGSSKRENLVAACRRCNSEKGNLPFSIWAATCTRPEVSVEAALVRLENFNWEKRDRAVKKGLIRRLKQTSEDEPIDERSL

SEQ ID NO: 4066 - protein, 162 aa, unidentified; identical to SEQ ID NO: 4064
  REGION 1..162: note = Description of Unknown: uncultivated organism with predicted taxonomy: Brevibacterium mcbrellneri
  REGION 1..162: note = MG3-88 HNH domain

SEQ ID NO: 4067 - protein, 158 aa, unidentified
  REGION 1..158: note = Description of Unknown: uncultivated organism with predicted taxonomy: Planctomycetes
  REGION 1..158: note = MG4-5 HNH domain
DMKRGRKQRKETWQAMRENERCRLDARKLLQDHGIQEPRPADILKVLLAEECNWECPYTGKAISMDALIGSQPQFDVEHIIPFSRSLDNSFLNKTLCYHEENRNVKQNRTPFEAYGGDEQRWHEILQRVRRFRGSAAESKLRKFQLRQLPADFTNRHL

SEQ ID NO: 4068 - protein, 159 aa, unidentified
  REGION 1..159: note = Description of Unknown: uncultivated organism
  REGION 1..159: note = MG4-11 HNH domain
DLKHNVKTKSKIIAQIKSREEEREAARKGLADLGIDNPTPANIKKWVIAERCNWTCVYTGKRADKRVEFGPHPQFDIDHIQPYSRSGNDSLGNKVLCFSAENRHVKKNQTPLECYGDDEERWNEIMGRVSAITGPDRVKTYRYFITTAEENEGFTARSL

SEQ ID NO: 4069 - protein, 161 aa, unidentified
  REGION 1..161: note = Description of Unknown: uncultivated organism
  REGION 1..161: note = MG4-12 HNH domain
DLKRSRKQRDEIFRKNQARKKERENIEKTLQNEFYIKSPKGRDVLKYRLWKECGGICPYTGMVISPDDLFGPNSRFDIEHIIPFSRSMDDSFANKTLCYAEENRNVKKNQTPIECYGDSPKFREILERVRKTFTGEFKFRKLKLFETQEPESITEFSKACL

SEQ ID NO: 4070 - protein, 158 aa, unidentified
  REGION 1..158: note = Description of Unknown: uncultivated organism
  REGION 1..158: note = MG4-13 HNH domain
EMKKTRQQREEIWKKNKQNEEKRKQAAQAIIKEAGENPKPADIEKYLLWDECNGICPYTGKSISLKQLFSGEVDVEHIIPYSICLDNSYFNKTLCFHDENAKVKNNKTPWQAYGSDEKKWNEILERVKRFKGDAAKEKLKKFQIKDLEELDDFISSQL

SEQ ID NO: 4071 - protein, 160 aa, unidentified
  REGION 1..160: note = Description of Unknown: uncultivated organism
  REGION 1..160: note = MG4-14 HNH domain
DLKKSKEDRKKISDQIARNRRDRERAKKALIDNGIQEPSRDDIEKWLLYEECNGICPYTGKSISLASLFGPNPQFDVEHIIPFSRCLDNSFTNKTLCDIEENRNRKRNQTPYEAYGADPARWEEIIQRVKRFRGKAAAAKLHRFQLESVDSLEEFASKQL

SEQ ID NO: 4072 - protein, 158 aa, unidentified
  REGION 1..158: note = Description of Unknown: uncultivated organism with predicted taxonomy: Thermogutta terrifontis
  REGION 1..158: note = MG4-15 HNH domain
ELKRSRKEREEISKRMREQQKRREEAAQRVLQELGRTAAPRDIEKYLLAEECNWICPYTGKQITTQALLGDHPEFDVEHIWPLHRSLDDSFMNKTLCYHQENRSVKAGRTPYEAYATDPVRWQEIITRVRNFRGPFARQKLVRFQAEEIPPDFALRQL

SEQ ID NO: 4073 - protein, 158 aa, unidentified; identical to SEQ ID NO: 4072
  REGION 1..158: note = Description of Unknown: uncultivated organism with predicted taxonomy: Thermogutta terrifontis
  REGION 1..158: note = MG4-16 HNH domain

SEQ ID NO: 4074 - protein, 158 aa, unidentified
  REGION 1..158: note = Description of Unknown: uncultivated organism with predicted taxonomy: Thermogutta terrifontis
  REGION 1..158: note = MG4-17 HNH domain
ELKRSRKERAEISKRMREQQKRREEAAQKVLEELGRTATPRDIEKYLLAQECNWQCPYTGRQITVQSLLGDDPQFDVEHIWPLHRSLDDSFMNKTLCYHHENRSVKAGRTPYEAYATDPLRWQEILSRVRSFRGPFARQKLDRFQAVEIPPDFAMRQL

SEQ ID NO: 4075 - protein, 158 aa, unidentified
  REGION 1..158: note = Description of Unknown: uncultivated organism with predicted taxonomy: Thermogutta terrifontis
  REGION 1..158: note = MG4-18 HNH domain
ELKRSRKEREEISKRMREQQKRREEAAQRVLQELGRTAAPRDIEKYLLAEECNWICPYTGKQITTQALLGDHPEFDVEHIWPLHRSLDDSFMNKTLCYHQENRSVKAGRTPYEAYATDPVRWQEIITRVRNFRGPFARQKLDRFQAEEIPPDFALRQL

SEQ ID NO: 4076 - protein, 160 aa, unidentified
  REGION 1..160: note = Description of Unknown: uncultivated organism
  REGION 1..160: note = MG4-19 HNH domain
DLKKPRHERAKAVSQNRDREKQRSAAKVKMLQEIGPGFEHPSRADVEKALLWEECQGECPYTGKRFPLSSLFGENPPLQVEHIIPFSRIPDDSFQNKTLCYHEENQIKGNRTPFEAYKDAEQFETILNRVRNWRTPNPGKQRRFELRTLEELEGFSSRQL

SEQ ID NO: 4077 - protein, 160 aa, unidentified; identical to SEQ ID NO: 4076
  REGION 1..160: note = Description of Unknown: uncultivated organism
  REGION 1..160: note = MG4-20 HNH domain

SEQ ID NO: 4078 - protein, 160 aa, unidentified; identical to SEQ ID NO: 4076
  REGION 1..160: note = Description of Unknown: uncultivated organism
  REGION 1..160: note = MG4-21 HNH domain

SEQ ID NO: 4079 - protein, 160 aa, unidentified; identical to SEQ ID NO: 4076
  REGION 1..160: note = Description of Unknown: uncultivated organism with predicted taxonomy: Planctomyces sp. SH-PL14
  REGION 1..160: note = MG4-22 HNH domain

SEQ ID NO: 4080 - protein, 160 aa, unidentified
  REGION 1..160: note = Description of Unknown: uncultivated organism
  REGION 1..160: note = MG4-23 HNH domain
DKKNPRHERAKAVSQNRDREKQRSAAKVKMLQEIGPGFEHPSRADVEKALLWEECQGECPYTGKRFPLSSLFGENPPLQVEHIIPFSRIPDDSFQNKTLCYHEENQIKGNRTPFEAYKDAEQFETILNRVRNWRTPNPGKQRRFELRTLEELEGFSSRQL

SEQ ID NO: 4081 - protein, 160 aa, unidentified; identical to SEQ ID NO: 4076
  REGION 1..160: note = Description of Unknown: uncultivated organism
  REGION 1..160: note = MG4-24 HNH domain

SEQ ID NO: 4082 - protein, 160 aa, unidentified; identical to SEQ ID NO: 4076
  REGION 1..160: note = Description of Unknown: uncultivated organism
  REGION 1..160: note = MG4-25 HNH domain

SEQ ID NO: 4083 - protein, 160 aa, unidentified; identical to SEQ ID NO: 4076
  REGION 1..160: note = Description of Unknown: uncultivated organism
  REGION 1..160: note = MG4-26 HNH domain

SEQ ID NO: 4084 - protein, 160 aa, unidentified; identical to SEQ ID NO: 4076
  REGION 1..160: note = Description of Unknown: uncultivated organism
  REGION 1..160: note = MG4-27 HNH domain

SEQ ID NO: 4085 - protein, 160 aa, unidentified; identical to SEQ ID NO: 4076
  REGION 1..160: note = Description of Unknown: uncultivated organism
  REGION 1..160: note = MG4-28 HNH domain

SEQ ID NO: 4086 - protein, 160 aa, unidentified; identical to SEQ ID NO: 4076
  REGION 1..160: note = Description of Unknown: uncultivated organism
  REGION 1..160: note = MG4-29 HNH domain

SEQ ID NO: 4087 - protein, 165 aa, unidentified
  REGION 1..165: note = Description of Unknown: uncultivated organism with predicted taxonomy: Alphaproteobacteria bacterium
  REGION 1..165: note = MG4-30 HNH domain
ELKKSKKQREAESKRNRENEAVRVKAKQTIKEITGDEHPSTDDVRRVQLFNDCRGTCVYCGETIAARNFLGRESQVDIDHIIPFSRSMDNSYANLVICHARCNRNKGDRTPFEAFSVDPESYGQIRDRVKIFAGDGRTVSEKIKRFEMDEGELEKFLGDFRNRQL

SEQ ID NO: 4088 - protein, 157 aa, unidentified
  REGION 1..157: note = Description of Unknown: uncultivated organism
  REGION 1..157: note = MG4-31 HNH domain
DLKNSRKKRADISKQNMERRGQREKAAELLAKQFGIEQPSHHDREKVLLHWECGGFCPYTGKPIELNDLFGPNPSFQVEHIWPLSASMDDSFMNKTLCHVDENARKGGRSPVDCYDQKTLDLIKERIGRFNCDWKVREAKRRRFTEPIPEDFHQRHL

SEQ ID NO: 4089 - protein, 158 aa, unidentified
  REGION 1..158: note = Description of Unknown: uncultivated organism
  REGION 1..158: note = MG4-32 HNH domain
DLKSGRGRRERIANRMRDREKEREAAASAIAREIGVADPPRWMIEKHLLAEECGWRCPYTGKGFGIHDLLGRNSQFDLEHIWPFSRSLDNSYANKTICYHEENRNRKQGRTPAEAYSEEELQAILERVRAFKGDPFLIQAKLRRFTDPIEEGFTERHL

SEQ ID NO: 4090 - protein, 157 aa, unidentified; identical to SEQ ID NO: 4088
  REGION 1..157: note = Description of Unknown: uncultivated organism with predicted taxonomy: Insolitispirillum peregrinum
  REGION 1..157: note = MG4-33 HNH domain

SEQ ID NO: 4091 - protein, 161 aa, unidentified
  REGION 1..161: note = Description of Unknown: uncultivated organism with predicted taxonomy: Planctomycetes bacterium
  REGION 1..161: note = MG4-34 HNH domain
DLKRGRKEREKQSKRMAARRKQREEAKRRLLKETGIADPRRSDIERVLLADECNWICPFTGVKFGWSDLFGPTPRFDVEHIWPYSRSLDDSFLNKTICDQRENRTRKRNQTPHEAYGATPEVYERILQRVRAFSGDPWVLAAKLSRFEAESIPEGHVDRHL

SEQ ID NO: 4092 - protein, 158 aa, unidentified; identical to SEQ ID NO: 4089
  REGION 1..158: note = Description of Unknown: uncultivated organism
  REGION 1..158: note = MG4-35 HNH domain

SEQ ID NO: 4093 - protein, 166 aa, unidentified
  REGION 1..166: note = Description of Unknown: uncultivated organism with predicted taxonomy: Proteobacteria
  REGION 1..166: note = MG4-36 HNH domain
ELRKSREERMNESKRMRGREKEREEILRRIRDEVGIPEEKISRDDVLKGLLWQECDGKCPYCGESLGGFASLYGGNSPAQIEHIIPFSRSLDNSFVNLTLAHVSDNNYKGDRTPWEAYGSNPERWDQILQRVSVFRGSYSKAKLNRFKMDENAVRELSEQFSSRAL

SEQ ID NO: 4094 - protein, 166 aa, unidentified
  REGION 1..166: note = Description of Unknown: uncultivated organism with predicted taxonomy: Solemya velesiana gill symbiont
  REGION 1..166: note = MG4-37 HNH domain
ELRKSREERMKESRRMRDREKEREEIIRRIRDEVGIPEEKISRDDVLKGLLWQECEGRCPYCGESLGGFASLFGGNSPAQIEHIIPFSRSLDNSFVNLTLAHVSDNAYKGDRTPREAYGSDPERWNEILQRVEVFKGSYSKAKLNRFKMDESAVGELFEQFSSRAL

SEQ ID NO: 4095 - protein, 166 aa, unidentified
  REGION 1..166: note = Description of Unknown: uncultivated organism with predicted taxonomy: Acidobacteria
  REGION 1..166: note = MG4-38 HNH domain
ELRKSREERQKESRRMREREAERERMRQKIHKEVGIPLEQIREEDVRKGLLYEECCRTCPYTGKPLGGFAGLFSGTSPVQIEHIIPYSISLDDSFANLTLCLASENAVKHNRTPYQAYSADPGRWEDIQARVRAFRGPYAAEKLRRFLMDEQAAAALLQRFSARHL

SEQ ID NO: 4096 - protein, 159 aa, unidentified
  REGION 1..159: note = Description of Unknown: uncultivated organism with predicted taxonomy: Planctomycetes
  REGION 1..159: note = MG4-39 HNH domain
DLKKSRHERQQLSKGMRQQQKQREDARNWLQHEMGISNPTAHDILKYRLWIECEKLCPYTGKPISKEALFGSEPQFDVEHIIPYSRCLDNSFANKTLCEVAENRAAKKNRTPYEAYGNAPQRWHEILQRVSRFRGDAAKAKLRRFQLTEIPADFANRHL

SEQ ID NO: 4097 - protein, 159 aa, unidentified
  REGION 1..159: note = Description of Unknown: uncultivated organism with predicted taxonomy: Thermogutta terrifontis
  REGION 1..159: note = MG4-40 HNH domain
DIKRSRREREALSRRMRKQEDSRKKAAQIAREHLGREPSPFEITKVLLAEECNWKCPYTGREKIELAALLGPEPQFDVEHIWPFDRSLDDSFANKTLCYHEENRLRKSNRTPWEAYGSDPHRWGEIIARVKQFKGEWAKEKLRRFLAQELPEDFPQRHL

SEQ ID NO: 4098 - protein, 159 aa, unidentified
  REGION 1..159: note = Description of Unknown: uncultivated organism with predicted taxonomy: Planctomycetes
  REGION 1..159: note = MG4-41 HNH domain
DLKKSRHERQQLSKGMRQQQKQREDARNWLQHEMGISNPTAHDILKYRLWIECEKLCPYTGKPISKEALFGSEPQFDMEHIIPHSRCLDDSFANKTLCELAENRAAKKNRTPYEAYGHDPQRWHEILQRVSRFQGDAAKAKLRRFQLTEIPADFANRHL

SEQ ID NO: 4099 - protein, 159 aa, unidentified; identical to SEQ ID NO: 4097
  REGION 1..159: note = Description of Unknown: uncultivated organism with predicted taxonomy: Thermogutta terrifontis
  REGION 1..159: note = MG4-42 HNH domain

SEQ ID NO: 4100 - protein, 159 aa, unidentified; identical to SEQ ID NO: 4097
  REGION 1..159: note = Description of Unknown: uncultivated organism
  REGION 1..159: note = MG4-43 HNH domain

SEQ ID NO: 4101 - protein, 170 aa, unidentified
  REGION 1..170: note = Description of Unknown: uncultivated organism with predicted taxonomy: Proteobacteria
  REGION 1..170: note = MG4-44 HNH domain
EMKQSRIQRQKRYQTMRDREKMRNQARQSLQAELGWDPNDIKGRDIEKWLLAEECSWVCPYSGKPINYHNLFGEKAEFDIEHIIPYSKSLDDSFVNKTLCHREWNQKKGNRTPAQAFKNTPEWEAMLQRVRAFKPLHAVHMKKGESSKRNPKYDLFCMEEIPPDYVDNKL

SEQ ID NO: 4102 - protein, 170 aa, unidentified; identical to SEQ ID NO: 4101
  REGION 1..170: note = Description of Unknown: uncultivated organism
  REGION 1..170: note = MG4-45 HNH domain

SEQ ID NO: 4103 - protein, 159 aa, unidentified; identical to SEQ ID NO: 4097
  REGION 1..159: note = Description of Unknown: uncultivated organism
  REGION 1..159: note = MG4-46 HNH domain

SEQ ID NO: 4104 - protein, 166 aa, unidentified
  REGION 1..166: note = Description of Unknown: uncultivated organism with predicted taxonomy: Proteobacteria
  REGION 1..166: note = MG4-47 HNH domain
ELRKSREERMKESRRMRDREKEREEIIRRIRDEVGIPEEKISRDDVLKGLLWQECEGRCPYCGESLGGFASLFGGNSPAQIEHIIPFSRSLDNSFVNLTLAHVSDNAYKGDRTPREAYGSDPERWDEILQRVEVFKGSYSKAKLNRFKMDESAVGELFEQFSSRAL

SEQ ID NO: 4105 - protein, 160 aa, unidentified
  REGION 1..160: note = Description of Unknown: uncultivated organism
  REGION 1..160: note = MG4-48 HNH domain
DLRRPLCEVREMIKQMRKREKMRREAERKLCEEHGIRKPTAREIEKYLLWKECNARCPYTNQDIRAEALFGSHPRFDVEHIIPWSRCLDDSFANKTLCEAKHNREQKRNRMPTEAYSREALEQIWERVRRFQGDYAAEKLRRFQMDPPPELHLIHRGDQL

SEQ ID NO: 4106 - protein, 159 aa, unidentified; identical to SEQ ID NO: 4098
  REGION 1..159: note = Description of Unknown: uncultivated organism
  REGION 1..159: note = MG4-49 HNH domain

SEQ ID NO: 4107 - protein, 166 aa, unidentified
  REGION 1..166: note = Description of Unknown: uncultivated organism with predicted taxonomy: Solemya velesiana gill symbiont
  REGION 1..166: note = MG4-51 HNH domain
ELRKSREEREKDSKRMREHEKEREAIIRRICEEIGIPETGISRDDVRKAMLWEECNGMCPYSGRSLGGFASLFSGNSPAQIEHIIPFSRSLDNSFVNLTLAHVSENAYKGDKTPWEAYGSNPEQWDRILQRVALFKGSYKKAKLNRFKMDSNAVGEFLEQFSSRAL

SEQ ID NO: 4108 - protein, 166 aa, unidentified
  REGION 1..166: note = Description of Unknown: uncultivated organism
  REGION 1..166: note = MG4-52 HNH domain
ELRKSREERMKESRRMRDREKEREEIIRRIRDEVGIPEEKISRDDVLKGLLWQECEGRCPYCGESLGGFASLFGGNSPAQIEHIIPFSRSLDNSFVNLTLAHVSDNAYKGDRTPREAYGSDPERWDEILQWVEVFKGSYSKAKLNRFKMDESAVGELFEQFSSRAL

SEQ ID NO: 4109 - protein, 161 aa, unidentified
  REGION 1..161: note = Description of Unknown: uncultivated organism
  REGION 1..161: note = MG4-53 HNH domain
EVKKNARQRHQIALRNRENERLRRAAAERIVREVGIANPSRADIEKVLLAEECNWHCPYTGKPISMAALFGEHPQFDVEHIIPFARSLDDSFMNKTLCDAEENRRVKRGRTPFEAYGSQPERWAEILRRVRAFKGSAADAKLERFRCESPPDATELCSRLL

SEQ ID NO: 4110 - protein, 166 aa, unidentified; identical to SEQ ID NO: 4095
  REGION 1..166: note = Description of Unknown: uncultivated organism
  REGION 1..166: note = MG4-54 HNH domain

SEQ ID NO: 4111 - protein, 170 aa, unidentified
  REGION 1..170: note = Description of Unknown: uncultivated organism with predicted taxonomy: Flavobacterium hercynium
  REGION 1..170: note = MG4-55 HNH domain
EMKQSRIQRQKRYQTMRDREKMRNQARQSLQAELGWDPNDIKGRDIEKWLLAEECGWVCPYSGKPINYHNLFGEKAEFDIEHIIPYSKSLDDSFVNKTLCHREWNQKKGNRTPAQAFKNTPEWETMLQRVRAFKPLHAVHMKKGESSKHNPKYDLFCMEEIPPDYVDNKL

SEQ ID NO: 4112 - protein, 166 aa, unidentified; identical to SEQ ID NO: 4093
  REGION 1..166: note = Description of Unknown: uncultivated organism with predicted taxonomy: Pseudoxanthobacter soli
  REGION 1..166: note = MG4-56 HNH domain

SEQ ID NO: 4113 - protein, 161 aa, unidentified
  REGION 1..161: note = Description of Unknown: uncultivated organism with predicted taxonomy: candidate division Zixibacteria bacterium CG_4_9_14_3_um_filter_46_8
  REGION 1..161: note = MG4-57 HNH domain
DLKRSKKQRQTLTERIRSREKLREDARKRLENEKLVERPTRNDIDKVLLADECNWICPYTGRQIGWKTLFGPSPQFDIEHIIPFSRCLDDSLANKTLCDIEENRNVKRNRTPWEAYGSNPEKWGQILDRVRRFKGDDAILKLQRFQLKDVGDFEEFSSRQL

SEQ ID NO: 4114 - protein, 166 aa, unidentified
  REGION 1..166: note = Description of Unknown: uncultivated organism
  REGION 1..166: note = MG4-58 HNH domain
ELRKSREERMKESRRMRDREKEREEIIRRIRDEVGIPEEKISRDDVLKGLLWQECEGRCPYCGESLGGFASLFGGNPPAQIEHIIPFSRSLDNSFVNLTLAHVSDNAYKGDRTPREAYGSDPERWNEILQRVEVFKGSYSKAKLNRFKMDESAVGELFEQFSSRAL

SEQ ID NO: 4115 - protein, 166 aa, unidentified; identical to SEQ ID NO: 4104
  REGION 1..166: note = Description of Unknown: uncultivated organism with predicted taxonomy: Proteobacteria
  REGION 1..166: note = MG4-60 HNH domain

SEQ ID NO: 4116 - protein, 159 aa, unidentified; identical to SEQ ID NO: 4097
  REGION 1..159: note = Description of Unknown: uncultivated organism with predicted taxonomy: Thermogutta terrifontis
  REGION 1..159: note = MG4-61 HNH domain

SEQ ID NO: 4117 - protein, 162 aa, unidentified
  REGION 1..162: note = Description of Unknown: uncultivated organism
  REGION 1..162: note = MG4-62 HNH domain
DLKQSRKKRKTASDRMRTREKEREKAAQRIITQPGLGIQHPKRWQIEKVLLAEECNWRCPFTDRGFCMADLLGSTPQVDVEHIWPYSRSMDDSFLNKTLCYHEENRNRKRGHTPMEAYGPTPEQYEAILDRVRRFKGDHFAVREKLRRFTDALDEDFPLRHL

SEQ ID NO: 4118 - protein, 157 aa, unidentified
  REGION 1..157: note = Description of Unknown: uncultivated organism with predicted taxonomy: Planctomyces sp. SH-PL14
  REGION 1..157: note = MG4-63 HNH domain
DLKNSRSRRADLTTRRNRNQARRERAKEAIEKECNNSRPSRFDIEKWLLAEECGFQCPYTGQSIPRHRVLSAEFEVEHIVPFSRSLDNSFTNKTLSHRDANAKKGNRTPMEAFGQPEEKWEQILARVKRFDGPFARRKLDLFQQRTPPEADFYERQL

SEQ ID NO: 4119 - protein, 162 aa, unidentified; identical to SEQ ID NO: 4117
  REGION 1..162: note = Description of Unknown: uncultivated organism
  REGION 1..162: note = MG4-64 HNH domain

SEQ ID NO: 4120 - protein, 159 aa, unidentified
  REGION 1..159: note = Description of Unknown: uncultivated organism
  REGION 1..159: note = MG4-65 HNH domain
DLKRPRKQREEISKRNRGRQKDREEAAEAIRSALPGLEPRRADIEKWLLAEECNWRCPYTGRSINAAALLGSTPQFDVEHIWPMSRSLDNTFANKTLCYHEENRARKGNRTPLEAYGSDPQRWEEILQSVRRFNGPLAWEKLRRFMAREIPQDFTDRQL

SEQ ID NO: 4121 - protein, 159 aa, unidentified
  REGION 1..159: note = Description of Unknown: uncultivated organism
  REGION 1..159: note = MG4-66 HNH domain
DLKKSRYERQQLFKGMRQQQKQREEAKSWLQCQMGITNPTAHDILKYRLWIECNQQCPYTGKPISKEALFGREPQFDVEHIIPFSRCLDNSFTNKTLCEIAENRNVKKNRTPYEAYGHDPQRWHEILQRVSRFQGDAAKAKLRRFQLTEIPADFANRHL

SEQ ID NO: 4122 - protein, 159 aa, unidentified
  REGION 1..159: note = Description of Unknown: uncultivated organism with predicted taxonomy: Proteobacteria
  REGION 1..159: note = MG4-67 HNH domain
DLKRSRKDRQELSKVIRENEKLREKAKERILRELGDQQPTRADIEKVLLAEECGWECPYTGKRFGMQELLGQNPQFDVEHIIPLSRSLDNSFGNKTLCYHEENRNHKRNRTPWEAYHADEQRWHQILERVRRFQGASARGKMRRFLMEAIPDDFTSRQL

SEQ ID NO: 4123 - protein, 158 aa, unidentified
  REGION 1..158: note = Description of Unknown: uncultivated organism with predicted taxonomy: Thermogutta terrifontis
  REGION 1..158: note = MG4-68 HNH domain
ELKLGKKRRQELAKEMRKREAERERAAKVIEETLHRKARPNEILKYLLADECDWECPYTGKKISVLTLLGDQPQFDVEHIWPFDRTLDDSFGNKTLCYHEENRQVKGNKTPFEAYSDSPDRWREILERVKRFKGPFAKEKLRRFLAADIPQDFPMRHL

SEQ ID NO: 4124 - protein, 166 aa, unidentified
  REGION 1..166: note = Description of Unknown: uncultivated organism with predicted taxonomy: Planctomycetes bacterium
  REGION 1..166: note = MG4-70 HNH domain
ELRKSREEREKDSKRMREHEKEREAIIRRICEEIGIPETRISRDDVRKAMLWEECNGMCPYSGRSLGGFASLFSGNSPAQIEHIIPFSRSLDNSFVNLTLAHVSENAYKGDKTPWEAYGANPEQWDRILQRVALFKGSYKKAKLNRFKMDSNAVGEFLEQFSSRAL

SEQ ID NO: 4125 - protein, 165 aa, unidentified
  REGION 1..165: note = Description of Unknown: uncultivated organism
  REGION 1..165: note = MG4-71 HNH domain
DLKKPRKEREKAWKGNREREKERKAAADRLLKEAGITNPSPADIEKVLLMEECGGICPYTGRPITIPALFGDSPQFDVEHIIPFSVSLDDSFVNKTLCWHEENRHHKRNKTPYEAYSGNRERYEEILRRVSRFSGRFRKEKLRRFQMTLADVKAEYGDDFTARHL

SEQ ID NO: 4126 - protein, 167 aa, unidentified
  REGION 1..167: note = Description of Unknown: uncultivated organism with predicted taxonomy: Acidobacteria
  REGION 1..167: note = MG4-72 HNH domain
DLKKSKKQRQAISENNRRNESARAKAAEAIIKADVGISAPSPDDIRKVLLAEECHWTCPYTGRSISMRSLLGPEPQFDIEHIVPFSRSMDNSFQNLTLCYVPENRSVKGNRTPWQAYHGDPERYQAILDRVRKFAGDRQTVAAKLRRFTMTDDELEGFLEDFRNRQL

SEQ ID NO: 4127 - protein, 165 aa, unidentified; identical to SEQ ID NO: 4125
  REGION 1..165: note = Description of Unknown: uncultivated organism
  REGION 1..165: note = MG4-73 HNH domain

SEQ ID NO: 4128 - protein, 167 aa, unidentified; identical to SEQ ID NO: 4126
  REGION 1..167: note = Description of Unknown: uncultivated organism with predicted taxonomy: Acidobacteria
  REGION 1..167: note = MG4-74 HNH domain

SEQ ID NO: 4129 - protein, 166 aa, unidentified; identical to SEQ ID NO: 4124
  REGION 1..166: note = Description of Unknown: uncultivated organism with predicted taxonomy: Proteobacteria
  REGION 1..166: note = MG4-76 HNH domain

SEQ ID NO: 4130 - protein, 166 aa, unidentified
  REGION 1..166: note = Description of Unknown: uncultivated organism
  REGION 1..166: note = MG4-77 HNH domain
ELRKSREERAEDSKRMRGREREREAVRDQIHKEIGIPLDQISREDVLKGLLYRECEGMCPYCGQSLGGFASLFGGNSPVQIEHIIPFSRSLDNSFVNLTLAHVSDNAEKGNRTPWEAYGHDPGKWEQILQRVGAFKGSYAKAKLNRFKMDEQAVADLLQQFSSRHL

SEQ ID NO: 4131 - protein, 162 aa, unidentified
  REGION 1..162: note = Description of Unknown: uncultivated organism
  REGION 1..162: note = MG4-78 HNH domain
ELRKPLRRLRELLRRNEERQRQRKHAIKYLIEKGIQDPRPDQIEKFLLWVECKQICPYTGQSISDVDLFGPLPRFDVEHIIPWSRCLDDSFANKTLCEVDHNRNRKRNRMPTEVYSQDELSQILRRVRAFQGPYRFEKLRRFQMTEADLTTETGWLLRGDQL

SEQ ID NO: 4132 - protein, 162 aa, unidentified; identical to SEQ ID NO: 4131
  REGION 1..162: note = Description of Unknown: uncultivated organism
  REGION 1..162: note = MG4-79 HNH domain

SEQ ID NO: 4133 - protein, 161 aa, unidentified
  REGION 1..161: note = Description of Unknown: uncultivated organism with predicted taxonomy: Planctomycetes
  REGION 1..161: note = MG4-80 HNH domain
DLRRSRKEREKISAEQAKREKARRDALQKMLREFPNYQPKRGYDPAIEKILLAEECDWECPFTGKKINMQTLLGKSPQFDVAHIYPRRYLDDSFANKTLCYHEENRHRMLDRLPMEAYAGNPQRWQEILARVKRFQGPYAAEKLRRFQTEKVPDDFVSRQL

SEQ ID NO: 4134 - protein, 166 aa, unidentified; identical to SEQ ID NO: 4130
  REGION 1..166: note = Description of Unknown: uncultivated organism with predicted taxonomy: Rhodobacteraceae
  REGION 1..166: note = MG4-81 HNH domain

SEQ ID NO: 4135 - protein, 158 aa, unidentified
  REGION 1..158: note = Description of Unknown: uncultivated organism
  REGION 1..158: note = MG4-82 HNH domain
DLKQPRKVREERSKSMRKNEALRQQIIDDIRRFGIANPSETDILKVRLADECNWQCPYTGKAISMETLLGPHPQFDIEHIQPYSRSLDNSFTNKTLCDVHENRIAKRNLTPFEAYSGDEQRWHEIIARVRRFRGPASPAKLRKFLAKAIDSDFVERQL

SEQ ID NO: 4136 - protein, 164 aa, unidentified
  REGION 1..164: note = Description of Unknown: uncultivated organism
  REGION 1..164: note = MG4-83 HNH domain
DMKRPRKARQQISKRIRANKNKRDAARQQLLKEASGALGSAWEPKRSDIEKWLLRDECGGICPYTGKPISFHSLFVEPEFDIEHIIPFSRSLDNSFLNKTLCCATENRIKSKRTPWEAYGGTARWDEIIGRVRKFTGDANVAKLQRFQIRDADKEIDGFAAREL

SEQ ID NO: 4137 - protein, 161 aa, unidentified
  REGION 1..161: note = Description of Unknown: uncultivated organism
  REGION 1..161: note = MG4-84 HNH domain
DLRKSPKQREQTWKKNRDNEALRKDAAEKLFREMGIQNPKRSDIEKMLLLQECGCMCPYTGKHISMRDLFGDAPQFDVEHIVPFSRSLDDSFLNKTLCEVAENRNVKGNRTPWEAYGHDLVRWNQILQRVSHFQGSAQREKLRRFQLQTIESPEQFASSQL

SEQ ID NO: 4138 - protein, 162 aa, unidentified; identical to SEQ ID NO: 4131
  REGION 1..162: note = Description of Unknown: uncultivated organism
  REGION 1..162: note = MG4-85 HNH domain

SEQ ID NO: 4139 - protein, 162 aa, unidentified; identical to SEQ ID NO: 4131
  REGION 1..162: note = Description of Unknown: uncultivated organism
  REGION 1..162: note = MG4-86 HNH domain

SEQ ID NO: 4140 - protein, 161 aa, unidentified
  REGION 1..161: note = Description of Unknown: uncultivated organism
  REGION 1..161: note = MG4-87 HNH domain
DLKHGRDRRAAITKQIRQREKQHADAKHRILAEIKGYEPTRIDREKVLLADECDWRCPYTGKKFGMKELIGEHPQVDVEHIWPFSRSFDNSFMNKTLCWHDENRRVKRGRTPYEAYSASPERYQEILGRVLAFKSDRRTVSEKFRRFTAEAIDEDFTNRHL

SEQ ID NO: 4141 - protein, 161 aa, unidentified
  REGION 1..161: note = Description of Unknown: uncultivated organism with predicted taxonomy: Planctomycetes bacterium
  REGION 1..161: note = MG4-88 HNH domain
DLRRSRKDRKRIAEQQREQETRRRKALERMMREFPNYQAKAGFDPAIEKILLAEECNWECPFTGRKIEMATLLGKNAQFDVAHLFPRRYLDDSFLNKTLCYHDENRHRMHDLLPKQAYGGDPQRWAEIIARVKAFKGSAATLKLERFLAAEVPEDFVESQL

SEQ ID NO: 4142 - protein, 161 aa, unidentified
  REGION 1..161: note = Description of Unknown: uncultivated organism with predicted taxonomy: Planctomicrobium piriforme
  REGION 1..161: note = MG4-89 HNH domain
DLKRARKQRERLSKEMREQEARRDSARAAIVRKAGLAGPSRSDIERYILAEECGFICPYTGKPMDRERLTDLVGRTPQFDVEHIWPLSRSLDDSYLNKTLCHVEENKAKGNRTPFEAYSQSPERWEQILDRVKRFGGTAARIKLERFTAKEIPDGFAERHL

SEQ ID NO: 4143 - protein, 162 aa, unidentified; identical to SEQ ID NO: 4117
  REGION 1..162: note = Description of Unknown: uncultivated organism
  REGION 1..162: note = MG4-90 HNH domain

SEQ ID NO: 4144 - protein, 166 aa, unidentified
  REGION 1..166: note = Description of Unknown: uncultivated organism with predicted taxonomy: Deltaproteobacteria bacterium
  REGION 1..166: note = MG4-91 HNH domain
ELKHGRSRREQTERRMRERAKQREAAAETIIRETTARGFRIDKPRRDDIEKYLLAEECGWICPYTGRSIGWESLFGPHPEFDIEHIWPFSRSLDNRFLNKRLCHAATNRSVKKNRTPYEAFGQDTEQWEQILDRVRRFKGDPYARREKLRRFEAQEIDEGFLERHL

SEQ ID NO: 4145 - protein, 158 aa, unidentified
  REGION 1..158: note = Description of Unknown: uncultivated organism with predicted taxonomy: Alphaproteobacteria
  REGION 1..158: note = MG4-92 HNH domain
DIKLGRKRRAEISKKMRTRQSEREDAKEQLRQWGVPVTHDAIERELLRRECNGVCPYTGREISPSQLFGESPQFDIEHIIPYSRSLDNSFANKTLCWHATNRNRKRGKTPYEVFSQDGDWEVILRRVAAFKGGYRDEKLRRFKLADLSEFDDFERRQL

SEQ ID NO: 4146 - protein, 158 aa, unidentified
  REGION 1..158: note = Description of Unknown: uncultivated organism with predicted taxonomy: Proteobacteria
  REGION 1..158: note = MG4-93 HNH domain
DIKLGRKRRAEISKKMRTRQSEREDAKEQLRQWGVPVTRDAIERELLRRECNGVCPYTGREISPSHLFGESPQFDIEHIIPYSRSLDNSFANKTLCWHATNRNRKRGKTPYEVFSQDGDWEVILRRVAAFKGGYRDEKLRRFKLADLSEFDDFERRQL

SEQ ID NO: 4147 - protein, 165 aa, unidentified
  REGION 1..165: note = Description of Unknown: uncultivated organism with predicted taxonomy: Planctomycetales bacterium 4484_113
  REGION 1..165: note = MG4-94 HNH domain
DVAQPAKRRQQAWKQNRQQERARKDAAERITKEAGIEKPSRDDILKVLLADECNWECPYTGRRINITELFGEHPQFDIEHIIPFDRCLDDSYVNKTLCEANENRNIKKGKTPYEAYYGTDKWENIISRVSRFNGRDRIKQAKLRRFKMHGEELEEFLDNFTNRQL

SEQ ID NO: 4148 - protein, 161 aa, unidentified
  REGION 1..161: note = Description of Unknown: uncultivated organism with predicted taxonomy: Planctomycetes bacterium
  REGION 1..161: note = MG4-95 HNH domain
DLRNSAKQRKNIMKKIEDNRKAREKAAEGILKEMPHFGEPKRADREKWLLADECNWECPYTGRQISVSALFGENPQFDVEHIIPFSRSLDDSFLNKTICEIAENRNVKRNYTPYEAYGRDEEKWNQILHRVKNFRGRAGNLKLERFQVKEAKFEDFASQQL

SEQ ID NO: 4149 - protein, 165 aa, unidentified; identical to SEQ ID NO: 4147
  REGION 1..165: note = Description of Unknown: uncultivated organism with predicted taxonomy: Planctomycetales bacterium 4484_113
  REGION 1..165: note = MG4-96 HNH domain

SEQ ID NO: 4150 - protein, 164 aa, unidentified
  REGION 1..164: note = Description of Unknown: uncultivated organism with predicted taxonomy: Planctomycetes bacterium
  REGION 1..164: note = MG4-97 HNH domain
DLKAPKQIRLRRSRQMRRNEAERKSARKELIEQGLPEPTGRDIEKYRLWKECGKRCPYTGKMISFSDLFGPHPKFDIEHIIPWHRCLLDSFANKTLCEVQENRSRKGNRTPYEAYSGDPDRYEEIKQRVREFTGPFGKAKLRRFRCEDIQKLPESLPLYGGEQL

SEQ ID NO: 4151 - protein, 163 aa, unidentified
  REGION 1..163: note = Description of Unknown: uncultivated organism
  REGION 1..163: note = MG4-98 HNH domain
ELKQSPKQRQETTKRMRRNEKERNDIREQIRNETGIENPTYTDILKVRLAKECNWECPYTGTHISMQQLIGPHPQFDIEHIIPHYRSLDNSFTNLTLCEARENREVKRNRTPYEAYHDTAKWEDIIRRVERFDGPMRNAKLRRFLLQGEELEKFLDGFTNRQL

SEQ ID NO: 4152 - protein, 161 aa, unidentified; identical to SEQ ID NO: 4148
  REGION 1..161: note = Description of Unknown: uncultivated organism with predicted taxonomy: Planctomycetes bacterium
  REGION 1..161: note = MG4-99 HNH domain

SEQ ID NO: 4153 - protein, 161 aa, unidentified; identical to SEQ ID NO: 4148
  REGION 1..161: note = Description of Unknown: uncultivated organism with predicted taxonomy: Planctomycetes bacterium
  REGION 1..161: note = MG4-100 HNH domain

SEQ ID NO: 4154 - protein, 163 aa, unidentified; identical to SEQ ID NO: 4151
  REGION 1..163: note = Description of Unknown: uncultivated organism
  REGION 1..163: note = MG4-101 HNH domain

SEQ ID NO: 4155 - protein, 163 aa, unidentified
  REGION 1..163: note = Description of Unknown: uncultivated organism
  REGION 1..163: note = MG4-102 HNH domain
EMKLSANRKKEIIKRNRDLEKQREKAAEKIRDVFPGMTPGRTDTTKVLLAEECGWRCPYTGRSISIRTLFGPHPQFDIEHIIPRSRSLDDSFLNKTLCYHEENRNVKRNRTPYEAYHGTPRYDEILDRVAKFNGRLAKEKLRRFRMTPEEVEDRFADFTQRQL

SEQ ID NO: 4156 - protein, 163 aa, unidentified; identical to SEQ ID NO: 4155
  REGION 1..163: note = Description of Unknown: uncultivated organism
  REGION 1..163: note = MG4-103 HNH domain

SEQ ID NO: 4157 - protein, 156 aa, unidentified
  REGION 1..156: note = Description of Unknown: uncultivated organism with predicted taxonomy: Planctomycetes bacterium
  REGION 1..156: note = MG4-104 HNH domain
DLKNSSKDRENITRRNRLREKERERIAREIAQEAGVEKPSRRDILKVMLAEECDYTCPYTGRRFSMRDLLHGGLVHIEHIVPYSRSMDDSFINKTLSCRDANAEKGNRLPFEVFSPEAYREILERVRRFKGPFAEAKLERFKMQKAESRDFIERNL

SEQ ID NO: 4158 - protein, 156 aa, unidentified
  REGION 1..156: note = Description of Unknown: uncultivated organism
  REGION 1..156: note = MG4-105 HNH domain
DLKNSSKDRENITRRNRLREKERERIAREIAQEAGVEKPSRRDILKVMLAEECDYTCPYTGRRFSMRDLLHGGLVHIEHIVPYSRSMDDSFINKTLSCRDANAEKGNRLPFEAFSPEAYREILERVRRFKGPFAEAKLERFKMQKAESRDFIERNL

SEQ ID NO: 4159 - protein, 156 aa, unidentified
  REGION 1..156: note = Description of Unknown: uncultivated organism
  REGION 1..156: note = MG4-106 HNH domain
DLKNSSKDRENISRKNSEREKERKKIAEKIAREAGIENPSPRDILKVMLAEECDYTCPYTGKSFSLNQLLHGGEIHIEHIVPYSRSMDDSYANKTLSYRDANMAKSDKLPFEAFDSAKYVEIIERVRHFKGSFAKIKLEKFELETAEVQDFINRNL

SEQ ID NO: 4160 - protein, 156 aa, unidentified; identical to SEQ ID NO: 4159
  REGION 1..156: note = Description of Unknown: uncultivated organism
  REGION 1..156: note = MG4-107 HNH domain

SEQ ID NO: 4161 - protein, 156 aa, unidentified; identical to SEQ ID NO: 4158
  REGION 1..156: note = Description of Unknown: uncultivated organism
  REGION 1..156: note = MG4-108 HNH domain

SEQ ID NO: 4162 - protein, 156 aa, unidentified; identical to SEQ ID NO: 4157
  REGION 1..156: note = Description of Unknown: uncultivated organism with predicted taxonomy: Planctomycetes bacterium
  REGION 1..156: note = MG4-109 HNH domain

SEQ ID NO: 4163 - protein, 156 aa, unidentified
  REGION 1..156: note = Description of Unknown: uncultivated organism
  REGION 1..156: note = MG4-110 HNH domain
DLKNSSKDRENIARRNRLREKERERIAREIAQEAGVEKPSRRDILKVMLAEECDYTCPYTGRRFSMRDLLHGGLVHIEHIVPYSRSMDDSFINKTLSCRDANAEKGNRLPFEAFSPEAYREILERVRRFKGPFAEAKLERFKLQKAESRDFIERNL

SEQ ID NO: 4164 - protein, 156 aa, unidentified
  REGION 1..156: note = Description of Unknown: uncultivated organism with predicted taxonomy: Planctomycetes bacterium
  REGION 1..156: note = MG4-111 HNH domain
DLKNSSKDRENISRKNSEREKERKKIAEKIAREAGIENPSPRDILKVMLAEECDYTCPYTGKSFSLNQLLHGGEIHIEHIVPYSRSMDDSYANKTLSYRDANMAKSDKLPFEAFDSAKYAEIIERVRHFKGSFAKIKLEKFELETAEVQDFINRNL

SEQ ID NO: 4165 - protein, 156 aa, unidentified; identical to SEQ ID NO: 4158
  REGION 1..156: note = Description of Unknown: uncultivated organism
  REGION 1..156: note = MG4-112 HNH domain

SEQ ID NO: 4166 - protein, 156 aa, unidentified; identical to SEQ ID NO: 4159
  REGION 1..156: note = Description of Unknown: uncultivated organism
  REGION 1..156: note = MG4-113 HNH domain

SEQ ID NO: 4167 - protein, 156 aa, unidentified; identical to SEQ ID NO: 4158
  REGION 1..156: note = Description of Unknown: uncultivated organism
  REGION 1..156: note = MG4-114 HNH domain

SEQ ID NO: 4168 - protein, 156 aa, unidentified; identical to SEQ ID NO: 4158
  REGION 1..156: note = Description of Unknown: uncultivated organism
  REGION 1..156: note = MG4-115 HNH domain

SEQ ID NO: 4169 - protein, 159 aa, unidentified
  REGION 1..159: note = Description of Unknown: uncultivated organism
  REGION 1..159: note = MG4-116 HNH domain
DLKKPRQERARATDLNRKRQRERDSVKERIVREGGLERPSRDDIEKVLLWEECGGICPYTGKSIAFASLFGEHPQFGVEHIIPFSRLPDNSFQNKTLCDHEQGRNVKRNKTPFEAYPNTEEYDAILTRIKAWETPNLGKQKRFELRTLEELEGFSTRQL

SEQ ID NO: 4170 - protein, 157 aa, unidentified
  REGION 1..157: note = Description of Unknown: uncultivated organism with predicted taxonomy: Acidobacteriales bacterium 59-55
  REGION 1..157: note = MG4-117 HNH domain
ELKKPRQERIEATKKNRNRQREREDVAVRILRECGLSNPSRRDIEKARLHEECGGYCPYTGRHIPFSTLFDNSEFDVEHIIPRSRYPDDSFQNKTLCYLPENRDVKKGQTPWEAYGKDEQRWAEIMTRVSSWKNRGKMARFAIQTEEALGDFSARQM

SEQ ID NO: 4171 - protein, 159 aa, unidentified; identical to SEQ ID NO: 4169
  REGION 1..159: note = Description of Unknown: uncultivated organism
  REGION 1..159: note = MG4-118 HNH domain

SEQ ID NO: 4172 - protein, 157 aa, unidentified; identical to SEQ ID NO: 4170
  REGION 1..157: note = Description of Unknown: uncultivated organism
  REGION 1..157: note = MG4-119 HNH domain

SEQ ID NO: 4173 - protein, 159 aa, unidentified; identical to SEQ ID NO: 4169
  REGION 1..159: note = Description of Unknown: uncultivated organism
  REGION 1..159: note = MG4-120 HNH domain

SEQ ID NO: 4174 - protein, 157 aa, unidentified
  REGION 1..157: note = Description of Unknown: uncultivated organism with predicted taxonomy: Acidobacteriales bacterium 59-55
  REGION 1..157: note = MG4-121 HNH domain
ELKKPRQERIEATKKNRNRQREREDVAVRILRECGLSNPSRRDIEKARLHEECGGYCPYTGRHIPFSTLFDNSEFDVEHIIPRSRYPDDSFQNKTLCYLPENRDVKKGQTPWEAYGKDEQRWAEIMTRVSSWKNRGKMSRFAIQTEEALGDFSARQM

SEQ ID NO: 4175 - protein, 157 aa, unidentified
  REGION 1..157: note = Description of Unknown: uncultivated organism with predicted taxonomy: uncultured bacterium
  REGION 1..157: note = MG4-122 HNH domain
ELKKPRQERLEATKKNRTRQREREDIAGRILRECGLSNPSRKDIEKARLHEECGGICPYTGRPIPFSTLFDNSEFDVEHIIPRSRYPDDSFQNKTLCYLPENRDVKKGQTPWEAYGKDEQRWAEIMTRVGSWKNRGKMARFSIQTEEALGEFSARQM

SEQ ID NO: 4176 - protein, 159 aa, unidentified; identical to SEQ ID NO: 4169
  REGION 1..159: note = Description of Unknown: uncultivated organism
  REGION 1..159: note = MG4-123 HNH domain

SEQ ID NO: 4177 - protein, 159 aa, unidentified; identical to SEQ ID NO: 4169
  REGION 1..159: note = Description of Unknown: uncultivated organism
  REGION 1..159: note = MG4-124 HNH domain

SEQ ID NO: 4178 - protein, 159 aa, unidentified; identical to SEQ ID NO: 4169
  REGION 1..159: note = Description of Unknown: uncultivated organism
  REGION 1..159: note = MG4-125 HNH domain

SEQ ID NO: 4179 - protein, 160 aa, unidentified
  REGION 1..160: note = Description of Unknown: uncultivated organism
  REGION 1..160: note = MG4-126 HNH domain
DLKKPRHERAEAFKYKRKWEKQRIDTKEKMLRELGPGFEYPSRADVEKALLWEECQGECPYTGKRFPFSSLYGENPPLQVEHIIPFSRIPDDSFQNKILCYHEDNQHKANRTPFEAYTDPAQYETILSRVRNWRTPNPGKQCRFELRTLEELEGFSERQL

SEQ ID NO: 4180 - protein, 157 aa, unidentified; identical to SEQ ID NO: 4175
  REGION 1..157: note = Description of Unknown: uncultivated organism
  REGION 1..157: note = MG4-127 HNH domain

SEQ ID NO: 4181 - protein, 157 aa, unidentified; identical to SEQ ID NO: 4170
  REGION 1..157: note = Description of Unknown: uncultivated organism with predicted taxonomy: Acidobacteriales bacterium 59-55
  REGION 1..157: note = MG4-128 HNH domain

SEQ ID NO: 4182 - protein, 160 aa, unidentified
  REGION 1..160: note = Description of Unknown: uncultivated organism
  REGION 1..160: note = MG4-129 HNH domain
ELKKPRSKRLDETARNRKREAENKALAERMHNECGTPQNPSRNDLEKAKLWVEQQGECPYTGRSLPFSRLFDDNNGFDVDHILPRSRHPDDSYQNKVLCWGDTNRMVKRNQTPYEAFAEQDPENWHQILARVARWKNPGKLRKFEIRSTDDLAEFSSRQL

SEQ ID NO: 4183 - protein, 161 aa, unidentified
  REGION 1..161: note = Description of Unknown: uncultivated organism with predicted taxonomy: Planctomycetes
  REGION 1..161: note = MG4-130 HNH domain
DLKKSRQQREDLTKQNRDNEKARDAARTKIAERLHCDENAVSNLDILKVRLAEECNWECPYTGKSIAIEALVGKHAQFDIEHIIPFSRSLDNSFLNKTLCDNHFNRHVKKNGTPHETCSSNEREWQEIIGRVKRFRGSAAHAKLRKFQQEKPDEDFAARML

SEQ ID NO: 4184 - protein, 157 aa, unidentified; identical to SEQ ID NO: 4170
  REGION 1..157: note = Description of Unknown: uncultivated organism
  REGION 1..157: note = MG4-131 HNH domain

SEQ ID NO: 4185 - protein, 165 aa, unidentified
  REGION 1..165: note = Description of Unknown: uncultivated organism with predicted taxonomy: Planctomycetes bacterium
  REGION 1..165: note = MG4-132 HNH domain
ELKKPRSKRLDETANNRKREAENRALAKRMHEECGIPQPPSRKDLEKAKLWVEQATGAGVCECPYTGKKLPFSRLFDDDNGFDVDHILPRSRHPDDSFQNKVLCWGEENRMHKRNQTPYEAYAEQDQERWQEILARVTRWKNPGKLRKFEIRSTDELEAFSSRQL

SEQ ID NO: 4186 - protein, 160 aa, unidentified; identical to SEQ ID NO: 4179
  REGION 1..160: note = Description of Unknown: uncultivated organism
  REGION 1..160: note = MG4-133 HNH domain

SEQ ID NO: 4187 - protein, 157 aa, unidentified; identical to SEQ ID NO: 4170
  REGION 1..157: note = Description of Unknown: uncultivated organism with predicted taxonomy: Acidobacteriales bacterium 59-55
  REGION 1..157: note = MG4-134 HNH domain

SEQ ID NO: 4188 - protein, 157 aa, unidentified; identical to SEQ ID NO: 4170
  REGION 1..157: note = Description of Unknown: uncultivated organism with predicted taxonomy: Acidobacteriales bacterium 59-55
  REGION 1..157: note = MG4-135 HNH domain

SEQ ID NO: 4189 - protein, 157 aa, unidentified; identical to SEQ ID NO: 4170
  REGION 1..157: note = Description of Unknown: uncultivated organism with predicted taxonomy: Acidobacteriales bacterium 59-55
  REGION 1..157: note = MG4-136 HNH domain

SEQ ID NO: 4190 - protein, 165 aa, unidentified; identical to SEQ ID NO: 4185
  REGION 1..165: note = Description of Unknown: uncultivated organism with predicted taxonomy: Acidobacteriales bacterium 59-55
  REGION 1..165: note = MG4-137 HNH domain

SEQ ID NO: 4191 - protein, 160 aa, unidentified
  REGION 1..160: note = Description of Unknown: uncultivated organism with predicted taxonomy: uncultured bacterium
  REGION 1..160: note = MG4-138 HNH domain
DLKKPRHERAKAVSYNRDREKQRTTAKEKMLREVGPGFQHPSRADVEKALLWEECQGECPYTGKRFPFSSLFGENPPLQVDHIIPFSRIPDDSFQNKTLCYHEENQHKGNRTPFEAYTDPAQYEAILNRVRSWRTPNPGKQRRFELRTLEELEGFSERQL

SEQ ID NO: 4192 - protein, 158 aa, unidentified
  REGION 1..158: note = Description of Unknown: uncultivated organism
  REGION 1..158: note = MG4-139 HNH domain
ELKKSRRERMESVSTNRDREKQRNAAKEKLLKELGLQHPSRADIEKALLWEECQGVCPYTGKQFPFSSLFGENPSMQVQHIIPFSRIPDDSFQNKTLCSVEENQYKANRTPFEAYADPAQYEAILDRVKNWPRPNRGKQRRFELRTLEELEGFSSRQL

SEQ ID NO: 4193 - protein, 168 aa, unidentified
  REGION 1..168: note = Description of Unknown: uncultivated organism with predicted taxonomy: Planctomycetes bacterium
  REGION 1..168: note = MG4-140 HNH domain
ELRKNRKQRQNATEAGDKQHLRRIDAARTILRECRNYDAQGRDAERLVRERRDDVTKMLLLMECRCLCPYTGDSISYLDLFGGEVEVEHIIPQSLMVDNSFNNLTLCYRKVNHEKLDKTPRQAFCRAEDDQQWIDIIGRVQKFGNKEKLHRFLLSSREDIDRFSNRRL

SEQ ID NO: 4194 - protein, 160 aa, unidentified; identical to SEQ ID NO: 4179
  REGION 1..160: note = Description of Unknown: uncultivated organism
  REGION 1..160: note = MG4-141 HNH domain

SEQ ID NO: 4195 - protein, 160 aa, unidentified; identical to SEQ ID NO: 4182
  REGION 1..160: note = Description of Unknown: uncultivated organism with predicted taxonomy: Polaribacter sp. ALD11
  REGION 1..160: note = MG4-142 HNH domain

SEQ ID NO: 4196 - protein, 157 aa, unidentified; identical to SEQ ID NO: 4170
  REGION 1..157: note = Description of Unknown: uncultivated organism
  REGION 1..157: note = MG4-143 HNH domain

SEQ ID NO: 4197 - protein, 157 aa, unidentified; identical to SEQ ID NO: 4175
  REGION 1..157: note = Description of Unknown: uncultivated organism
  REGION 1..157: note = MG4-144 HNH domain

SEQ ID NO: 4198 - protein, 160 aa, unidentified; identical to SEQ ID NO: 4179
  REGION 1..160: note = Description of Unknown: uncultivated organism
  REGION 1..160: note = MG4-145 HNH domain

SEQ ID NO: 4199 - protein, 157 aa, unidentified; identical to SEQ ID NO: 4170
  REGION 1..157: note = Description of Unknown: uncultivated organism with predicted taxonomy: Acidobacteriales bacterium 59-55
  REGION 1..157: note = MG4-146 HNH domain

SEQ ID NO: 4200 - protein, 160 aa, unidentified; identical to SEQ ID NO: 4179
  REGION 1..160: note = Description of Unknown: uncultivated organism
  REGION 1..160: note = MG4-147 HNH domain

SEQ ID NO: 4201 - protein, 157 aa, unidentified; identical to SEQ ID NO: 4170
  REGION 1..157: note = Description of Unknown: uncultivated organism
  REGION 1..157: note = MG4-148 HNH domain

SEQ ID NO: 4202 - protein, 157 aa, unidentified; identical to SEQ ID NO: 4170
  REGION 1..157: note = Description of Unknown: uncultivated organism
  REGION 1..157: note = MG4-149 HNH domain

SEQ ID NO: 4203 - protein, 160 aa, unidentified
  REGION 1..160: note = Description of Unknown: uncultivated organism with predicted taxonomy: Polaribacter sp. ALD11
  REGION 1..160: note = MG4-150 HNH domain
ELKKPRSKRLDETARNRKREAENKALAERMHNECGMPQNSSRNDLEKAKLWVEQQGQCPYTGRSLPFSRLFDDNNGFDVDHILPRSRHPDDSYQNKVLCWGDTNRMVKRNQTPYEAFAEQDPENWHQILARVARWKNPGKSRKFEIRSTDELAEFSSRQL

SEQ ID NO: 4204 - protein, 165 aa, unidentified; identical to SEQ ID NO: 4185
  REGION 1..165: note = Description of Unknown: uncultivated organism with predicted taxonomy: Acidobacteriales
  REGION 1..165: note = MG4-151 HNH domain

SEQ ID NO: 4205 - protein, 160 aa, unidentified; identical to SEQ ID NO: 4179
  REGION 1..160: note = Description of Unknown: uncultivated organism
  REGION 1..160: note = MG4-152 HNH domain

SEQ ID NO: 4206 - protein, 157 aa, unidentified; identical to SEQ ID NO: 4170
  REGION 1..157: note = Description of Unknown: uncultivated organism
  REGION 1..157: note = MG4-153 HNH domain

SEQ ID NO: 4207 - protein, 157 aa, unidentified
  REGION 1..157: note = Description of Unknown: uncultivated organism with predicted taxonomy: Acidobacteriales bacterium 59-55
  REGION 1..157: note = MG4-154 HNH domain
ELKKPRQERLEATKKNRTRQREREDIAGKILRECGLSNPSRKDIEKARLHEECGGICPYTGRHIPFSTLFDNSEFDVEHIIPRSRYPDDSFQNKTLCYLPENRDVKKGQTPWEAYGKDEQRWAEIMTRVGSWKNRGKMARFSIQTEEALGEFSARQM

SEQ ID NO: 4208 - protein, 161 aa, unidentified
  REGION 1..161: note = Description of Unknown: uncultivated organism with predicted taxonomy: Deltaproteobacteria
  REGION 1..161: note = MG4-155 HNH domain
DLKASRPEREDRWARMRRNEKARAEAAAKIQSEIGIHTPGRADTEKWLLAEECHWRCPYSGRGFSATQLYQSGEIQVEHIIPFSRSLDDSFANKTLAYSWVNKAKGNRSPREAFQEQSQWEAILTEVGSFHGPYAKHKLQRFQWTSEQIAELLDDFTKRQL

SEQ ID NO: 4209 - protein, 163 aa, unidentified
  REGION 1..163: note = Description of Unknown: uncultivated organism with predicted taxonomy: Planctomycetes bacterium
  REGION 1..163: note = MG4-156 HNH domain
ELKKPAKARERIAQENRQREDLRKKTIERIFRECGLGKPSNADIEKAILWEECQHHDPYTGGSINFHDLFGSDAKWEIEHIIPHSRSQDDSLTNKTLCSRETNRQKGNRTPFEVFGNTPEWEAMVERVTKFQGDKRAMTRKLARFTMEGGVEELFGEFTQRQL

SEQ ID NO: 4210 - protein, 157 aa, unidentified; identical to SEQ ID NO: 4170
  REGION 1..157: note = Description of Unknown: uncultivated organism
  REGION 1..157: note = MG4-157 HNH domain

SEQ ID NO: 4211 - protein, 157 aa, unidentified; identical to SEQ ID NO: 4170
  REGION 1..157: note = Description of Unknown: uncultivated organism
  REGION 1..157: note = MG4-158 HNH domain

SEQ ID NO: 4212 - protein, 157 aa, unidentified; identical to SEQ ID NO: 4170
  REGION 1..157: note = Description of Unknown: uncultivated organism with predicted taxonomy: Acidobacteriales bacterium 59-55
  REGION 1..157: note = MG4-159 HNH domain

SEQ ID NO: 4213 - protein, 161 aa, unidentified; identical to SEQ ID NO: 4183
  REGION 1..161: note = Description of Unknown: uncultivated organism with predicted taxonomy: Planctomycetes
  REGION 1..161: note = MG4-160 HNH domain

SEQ ID NO: 4214 - protein, 157 aa, unidentified; identical to SEQ ID NO: 4170
  REGION 1..157: note = Description of Unknown: uncultivated organism with predicted taxonomy: Acidobacteriales bacterium 59-55
  REGION 1..157: note = MG4-161 HNH domain

SEQ ID NO: 4215 - protein, 160 aa, unidentified; identical to SEQ ID NO: 4076
  REGION 1..160: note = Description of Unknown: uncultivated organism
  REGION 1..160: note = MG4-162 HNH domain

SEQ ID NO: 4216 - protein, 160 aa, unidentified; identical to SEQ ID NO: 4182
  REGION 1..160: note = Description of Unknown: uncultivated organism with predicted taxonomy: Acidobacteriales bacterium 59-55
  REGION 1..160: note = MG4-163 HNH domain

SEQ ID NO: 4217 - protein, 160 aa, unidentified; identical to SEQ ID NO: 4179
  REGION 1..160: note = Description of Unknown: uncultivated organism
  REGION 1..160: note = MG4-164 HNH domain

SEQ ID NO: 4218 - protein, 157 aa, unidentified; identical to SEQ ID NO: 4170
  REGION 1..157: note = Description of Unknown: uncultivated organism
  REGION 1..157: note = MG4-165 HNH domain

SEQ ID NO: 4219 - protein, 157 aa, unidentified; identical to SEQ ID NO: 4207
  REGION 1..157: note = Description of Unknown: uncultivated organism with predicted taxonomy: Candidatus Sulfotelmatomonas gaucii
  REGION 1..157: note = MG4-166 HNH domain

SEQ ID NO: 4220 - protein, 165 aa, unidentified; identical to SEQ ID NO: 4185
  REGION 1..165: note = Description of Unknown: uncultivated organism with predicted taxonomy: Acidobacteriales bacterium 59-55
  REGION 1..165: note = MG4-167 HNH domain

SEQ ID NO: 4221 - protein, 160 aa, unidentified; identical to SEQ ID NO: 4179
  REGION 1..160: note = Description of Unknown: uncultivated organism
  REGION 1..160: note = MG4-168 HNH domain

SEQ ID NO: 4222 - protein, 157 aa, unidentified; identical to SEQ ID NO: 4170
  REGION 1..157: note = Description of Unknown: uncultivated organism
  REGION 1..157: note = MG4-169 HNH domain

SEQ ID NO: 4223 - protein, 160 aa, unidentified; identical to SEQ ID NO: 4179
  REGION 1..160: note = Description of Unknown: uncultivated organism
  REGION 1..160: note = MG4-170 HNH domain

SEQ ID NO: 4224 - protein, 157 aa, unidentified; identical to SEQ ID NO: 4170
  REGION 1..157: note = Description of Unknown: uncultivated organism
  REGION 1..157: note = MG4-171 HNH domain

SEQ ID NO: 4225 - protein, 157 aa, unidentified; identical to SEQ ID NO: 4170
  REGION 1..157: note = Description of Unknown: uncultivated organism
  REGION 1..157: note = MG4-172 HNH domain

SEQ ID NO: 4226 - protein, 167 aa, unidentified
  REGION 1..167: note = Description of Unknown: uncultivated organism with predicted taxonomy: Ignavibacteriales bacterium CG_4_9_14_3_um_filter_30_11
  REGION 1..167: note = MG4-173 HNH domain
DLKKSKKERQKQTEINRDREKLRQEATGELRKHDVVRFANPRNSDIEKYLLATEARWQCPYTSKKYGVTDVFGDHPQVDVEHIIPRSRSLDDSYLNKTLAYRSANMEKGNRTPREWLFESDQEQYDRMIGVVSGFDPRFEVGKKLRRFSMELSDPDSLLKEFTERQL

SEQ ID NO: 4227 - protein, 160 aa, unidentified; identical to SEQ ID NO: 4191
  REGION 1..160: note = Description of Unknown: uncultivated organism with predicted taxonomy: uncultured bacterium
  REGION 1..160: note = MG4-174 HNH domain

SEQ ID NO: 4228 - protein, 160 aa, unidentified; identical to SEQ ID NO: 4179
  REGION 1..160: note = Description of Unknown: uncultivated organism
  REGION 1..160: note = MG4-175 HNH domain

SEQ ID NO: 4229 - protein, 157 aa, unidentified; identical to SEQ ID NO: 4170
  REGION 1..157: note = Description of Unknown: uncultivated organism with predicted taxonomy: Acidobacteriales bacterium 59-55
  REGION 1..157: note = MG4-176 HNH domain

SEQ ID NO: 4230 - protein, 168 aa, unidentified; identical to SEQ ID NO: 4193
  REGION 1..168: note = Description of Unknown: uncultivated organism
  REGION 1..168: note = MG4-177 HNH domain

SEQ ID NO: 4231 - protein, 157 aa, unidentified; identical to SEQ ID NO: 4170
  REGION 1..157: note = Description of Unknown: uncultivated organism with predicted taxonomy: Acidobacteriales bacterium 59-55
  REGION 1..157: note = MG4-178 HNH domain

SEQ ID NO: 4232 - protein, 160 aa, unidentified; identical to SEQ ID NO: 4182
  REGION 1..160: note = Description of Unknown: uncultivated organism with predicted taxonomy: Acidobacteria
  REGION 1..160: note = MG4-179 HNH domain

SEQ ID NO: 4233 - protein, 157 aa, unidentified; identical to SEQ ID NO: 4175
  REGION 1..157: note = Description of Unknown: uncultivated organism
  REGION 1..157: note = MG4-180 HNH domain

SEQ ID NO: 4234 - protein, 160 aa, unidentified; identical to SEQ ID NO: 4179
  REGION 1..160: note = Description of Unknown: uncultivated organism
  REGION 1..160: note = MG4-181 HNH domain

SEQ ID NO: 4235 - protein, 157 aa, unidentified; identical to SEQ ID NO: 4170
  REGION 1..157: note = Description of Unknown: uncultivated organism
  REGION 1..157: note = MG4-182 HNH domain

SEQ ID NO: 4236 - protein, 160 aa, unidentified; identical to SEQ ID NO: 4191
  REGION 1..160: note = Description of Unknown: uncultivated organism
  REGION 1..160: note = MG4-183 HNH domain

SEQ ID NO: 4237 - protein, 157 aa, unidentified; identical to SEQ ID NO: 4175
  REGION 1..157: note = Description of Unknown: uncultivated organism
  REGION 1..157: note = MG4-184 HNH domain

SEQ ID NO: 4238 - protein, 157 aa, unidentified; identical to SEQ ID NO: 4170
  REGION 1..157: note = Description of Unknown: uncultivated organism
  REGION 1..157: note = MG4-185 HNH domain

SEQ ID NO: 4239 - protein, 160 aa, unidentified; identical to SEQ ID NO: 4179
  REGION 1..160: note = Description of Unknown: uncultivated organism
  REGION 1..160: note = MG4-186 HNH domain

SEQ ID NO: 4240 - protein, 160 aa, unidentified; identical to SEQ ID NO: 4182
  REGION 1..160: note = Description of Unknown: uncultivated organism with predicted taxonomy: Polaribacter sp. ALD11
  REGION 1..160: note = MG4-187 HNH domain

SEQ ID NO: 4241 - protein, 157 aa, unidentified; identical to SEQ ID NO: 4170
  REGION 1..157: note = Description of Unknown: uncultivated organism with predicted taxonomy: Acidobacteriales bacterium 59-55
  REGION 1..157: note = MG4-188 HNH domain

SEQ ID NO: 4242 - protein, 160 aa, unidentified; identical to SEQ ID NO: 4182
  REGION 1..160: note = Description of Unknown: uncultivated organism with predicted taxonomy: Polaribacter sp. ALD11
  REGION 1..160: note = MG4-189 HNH domain

SEQ ID NO: 4243 - protein, 157 aa, unidentified; identical to SEQ ID NO: 4175
  REGION 1..157: note = Description of Unknown: uncultivated organism
  REGION 1..157: note = MG4-190 HNH domain

SEQ ID NO: 4244 - protein, 160 aa, unidentified; identical to SEQ ID NO: 4179
  REGION 1..160: note = Description of Unknown: uncultivated organism
  REGION 1..160: note = MG4-191 HNH domain

SEQ ID NO: 4245 - protein, 157 aa, unidentified; identical to SEQ ID NO: 4170
  REGION 1..157: note = Description of Unknown: uncultivated organism
  REGION 1..157: note = MG4-192 HNH domain

SEQ ID NO: 4246 - protein, 157 aa, unidentified; identical to SEQ ID NO: 4170
  REGION 1..157: note = Description of Unknown: uncultivated organism with predicted taxonomy: Acidobacteriales bacterium 59-55
  REGION 1..157: note = MG4-193 HNH domain

SEQ ID NO: 4247 - protein, 160 aa, unidentified; identical to SEQ ID NO: 4179
  REGION 1..160: note = Description of Unknown: uncultivated organism
  REGION 1..160: note = MG4-194 HNH domain

SEQ ID NO: 4248 - protein, 157 aa, unidentified; identical to SEQ ID NO: 4170
  REGION 1..157: note = Description of Unknown: uncultivated organism
  REGION 1..157: note = MG4-195 HNH domain

SEQ ID NO: 4249 - protein, 160 aa, unidentified; identical to SEQ ID NO: 4182
  REGION 1..160: note = Description of Unknown: uncultivated organism with predicted taxonomy: Acidobacteriales bacterium 59-55
  REGION 1..160: note = MG4-196 HNH domain

SEQ ID NO: 4250 - protein, 157 aa, unidentified; identical to SEQ ID NO: 4170
  REGION 1..157: note = Description of Unknown: uncultivated organism
  REGION 1..157: note = MG4-197 HNH domain

SEQ ID NO: 4251 - protein, 163 aa, unidentified; identical to SEQ ID NO: 4209
  REGION 1..163: note = Description of Unknown: uncultivated organism
  REGION 1..163: note = MG4-198 HNH domain

SEQ ID NO: 4252 - protein, 160 aa, unidentified; identical to SEQ ID NO: 4179
  REGION 1..160: note = Description of Unknown: uncultivated organism
  REGION 1..160: note = MG4-199 HNH domain

SEQ ID NO: 4253 - protein, 160 aa, unidentified; identical to SEQ ID NO: 4179
  REGION 1..160: note = Description of Unknown: uncultivated organism
  REGION 1..160: note = MG4-200 HNH domain

SEQ ID NO: 4254 - protein, 160 aa, unidentified; identical to SEQ ID NO: 4182
  REGION 1..160: note = Description of Unknown: uncultivated organism with predicted taxonomy: Acidobacteriales bacterium 59-55
  REGION 1..160: note = MG4-201 HNH domain

SEQ ID NO: 4255 - protein, 157 aa, unidentified; identical to SEQ ID NO: 4170
  REGION 1..157: note = Description of Unknown: uncultivated organism with predicted taxonomy: Acidobacteriales bacterium 59-55
  REGION 1..157: note = MG4-202 HNH domain

SEQ ID NO: 4256 - protein, 157 aa, unidentified; identical to SEQ ID NO: 4170
  REGION 1..157: note = Description of Unknown: uncultivated organism with predicted taxonomy: Acidobacteriales bacterium 59-55
  REGION 1..157: note = MG4-203 HNH domain

SEQ ID NO: 4257 - protein, 157 aa, unidentified; identical to SEQ ID NO: 4170
  REGION 1..157: note = Description of Unknown: uncultivated organism with predicted taxonomy: Acidobacteriales bacterium 59-55
  REGION 1..157: note = MG4-204 HNH domain

SEQ ID NO: 4258 - protein, 167 aa, unidentified
  REGION 1..167: note = Description of Unknown: uncultivated organism with predicted taxonomy: Acidobacteria
  REGION 1..167: note = MG4-205 HNH domain
DLKKSKKERQYQAELNREREKMRQEATEELRKYDAVRFANPRNTDIEKYLLAKEARWQCPYTNKKYGFTDVFGDHPQVDVEHIIPRSRSLDDSYVNKTLAYRSANAEKGNRTPREWLFESDQEQYEQMIRVVKQFDPRFEVGKKLRRFSMELSDPDSLLREFTERQL

SEQ ID NO: 4259 - protein, 157 aa, unidentified; identical to SEQ ID NO: 4170
  REGION 1..157: note = Description of Unknown: uncultivated organism
  REGION 1..157: note = MG4-206 HNH domain

SEQ ID NO: 4260 - protein, 167 aa, unidentified; identical to SEQ ID NO: 4258
  REGION 1..167: note = Description of Unknown: uncultivated organism
  REGION 1..167: note = MG4-207 HNH domain

SEQ ID NO: 4261 - protein, 157 aa, unidentified; identical to SEQ ID NO: 4175
  REGION 1..157: note = Description of Unknown: uncultivated organism
  REGION 1..157: note = MG4-208 HNH domain

SEQ ID NO: 4262 - protein, 160 aa, unidentified; identical to SEQ ID NO: 4179
  REGION 1..160: note = Description of Unknown: uncultivated organism
  REGION 1..160: note = MG4-209 HNH domain

SEQ ID NO: 4263 - protein, 168 aa, unidentified; identical to SEQ ID NO: 4193
  REGION 1..168: note = Description of Unknown: uncultivated organism with predicted taxonomy: candidate division Kazan bacterium
  REGION 1..168: note = MG4-210 HNH domain

SEQ ID NO: 4264 - protein, 160 aa, unidentified; identical to SEQ ID NO: 4182
  REGION 1..160: note = Description of Unknown: uncultivated organism with predicted taxonomy: Acidobacteriales bacterium 59-55
  REGION 1..160: note = MG4-211 HNH domain

SEQ ID NO: 4265 - protein, 157 aa, unidentified; identical to SEQ ID NO: 4175
  REGION 1..157: note = Description of Unknown: uncultivated organism
  REGION 1..157: note = MG4-212 HNH domain

SEQ ID NO: 4266 - protein, 160 aa, unidentified; identical to SEQ ID NO: 4182
  REGION 1..160: note = Description of Unknown: uncultivated organism with predicted taxonomy: Polaribacter sp. ALD11
  REGION 1..160: note = MG4-213 HNH domain

SEQ ID NO: 4267 - protein, 160 aa, unidentified; identical to SEQ ID NO: 4179
  REGION 1..160: note = Description of Unknown: uncultivated organism
  REGION 1..160: note = MG4-214 HNH domain

SEQ ID NO: 4268 - protein, 168 aa, unidentified; identical to SEQ ID NO: 4193
  REGION 1..168: note = Description of Unknown: uncultivated organism
  REGION 1..168: note = MG4-215 HNH domain

SEQ ID NO: 4269 - protein, 157 aa, unidentified; identical to SEQ ID NO: 4170
  REGION 1..157: note = Description of Unknown: uncultivated organism
  REGION 1..157: note = MG4-216 HNH domain

SEQ ID NO: 4270 - protein, 162 aa, unidentified
  REGION 1..162: note = Description of Unknown: uncultivated organism with predicted taxonomy: candidate division Zixibacteria bacterium CG_4_9_14_3_um_filter_46_8
  REGION 1..162: note = MG4-217 HNH domain
DLKQSKDHRLRATKNARDNEESRKAAIRKILAETPVRSPGPDDILRAQLYEECNHECPYTGRKIAFAALFGDSPQFDIEHIIPFSRCLDDSFANKTLCYHEVNRHVKGNRTPLEAFGSTPEWERIVQSVRLFSGKAAEGKLRRFLMTEEEILKLQDFANSQL

SEQ ID NO: 4271 - protein, 161 aa, unidentified
  REGION 1..161: note = Description of Unknown: uncultivated organism with predicted taxonomy: Planctomicrobium piriforme
  REGION 1..161: note = MG4-218 HNH domain
DMRRSKKQRQESWLRMRQNERDRKRAAQKILAEMNNDSPSRQDKEKVLLAEECNWTCPYTGKCISMQSLLGPTPQFDIEHIIPFSRSLDDSFTNKTLCDIAENRDHKRNRTPFEAYAAEPDKWNAILGRVGRFRSNAREEKVRRFRQEEIEGIEDFAARQL

SEQ ID NO: 4272 - protein, 157 aa, unidentified; identical to SEQ ID NO: 4207
  REGION 1..157: note = Description of Unknown: uncultivated organism with predicted taxonomy: Candidatus Sulfotelmatomonas gaucii
  REGION 1..157: note = MG4-219 HNH domain

SEQ ID NO: 4273 - protein, 162 aa, unidentified
  REGION 1..162: note = Description of Unknown: uncultivated organism with predicted taxonomy: Proteobacteria
  REGION 1..162: note = MG4-220 HNH domain
DLRKSRKEREANWKKNRDIEKSRKIMAERITAEAGITDPSREDIRKALLAKECGWVCPYTGRAISMRALVGPDAQFDIEHIIPFSQSLDNSFFNVTLCYHEENRNRKRNQTPYGAYGNEPEKFQEILDRVRRFDSDLADEKLKRFQLTDTADILKGFVDRQL

SEQ ID NO: 4274 - protein, 160 aa, unidentified; identical to SEQ ID NO: 4182
  REGION 1..160: note = Description of Unknown: uncultivated organism with predicted taxonomy: Acidobacteriales bacterium 59-55
  REGION 1..160: note = MG4-221 HNH domain

SEQ ID NO: 4275 - protein, 157 aa, unidentified; identical to SEQ ID NO: 4170
  REGION 1..157: note = Description of Unknown: uncultivated organism
  REGION 1..157: note = MG4-222 HNH domain

SEQ ID NO: 4276 - protein, 160 aa, unidentified; identical to SEQ ID NO: 4179
  REGION 1..160: note = Description of Unknown: uncultivated organism
  REGION 1..160: note = MG4-223 HNH domain

SEQ ID NO: 4277 - protein, 157 aa, unidentified; identical to SEQ ID NO: 4175
  REGION 1..157: note = Description of Unknown: uncultivated organism
  REGION 1..157: note = MG4-224 HNH domain

SEQ ID NO: 4278 - protein, 168 aa, unidentified; identical to SEQ ID NO: 4193
  REGION 1..168: note = Description of Unknown: uncultivated organism
  REGION 1..168: note = MG4-225 HNH domain

SEQ ID NO: 4279 - protein, 160 aa, unidentified; identical to SEQ ID NO: 4182
  REGION 1..160: note = Description of Unknown: uncultivated organism with predicted taxonomy: Polaribacter sp. ALD11
  REGION 1..160: note = MG4-226 HNH domain

SEQ ID NO: 4280 - protein, 160 aa, unidentified; identical to SEQ ID NO: 4179
  REGION 1..160: note = Description of Unknown: uncultivated organism
  REGION 1..160: note = MG4-227 HNH domain

SEQ ID NO: 4281 - protein, 164 aa, unidentified
  REGION 1..164: note = Description of Unknown: uncultivated organism
  REGION 1..164: note = MG4-247 HNH domain
DLKKSKKDREDIWKRNRENEKAREEAAKKILAEIPNLKPSRRDKEKVLLYEECGHKCPYTGKQISMASLLGDHPQFDIEHIIPFPRSLDDSFLNKTLCYAEENRNVKQGKTPHEAYGSNPTRWEEIIQRVKDFKGKARDIKLERFEAHGEKLDKLLGEFANRQL

SEQ ID NO: 4282 - protein, 164 aa, unidentified; identical to SEQ ID NO: 4281
  REGION 1..164: note = Description of Unknown: uncultivated organism with predicted taxonomy: Planctomycetes
  REGION 1..164: note = MG4-248 HNH domain

SEQ ID NO: 4283 - protein, 163 aa, unidentified
  REGION 1..163: note = Description of Unknown: uncultivated organism with predicted taxonomy: Fuerstia marisgermanicae
  REGION 1..163: note = MG4-249 HNH domain
ELKKPKKRRELISKRNDENRSERETARREITEETGDPYPGKTDIRKVLLRRECGDQCVYCGEQFSGSNFFSDDAPIEIDHIIPRSLHWDDSFLNLALCHAKCNREKGDNTPAQVFSDEVIEQIRDRIRRFSGNEKTKRERFRRFTLAGAELSAYLEEFSRRQL

SEQ ID NO: 4284 - protein, 163 aa, unidentified
  REGION 1..163: note = Description of Unknown: uncultivated organism
  REGION 1..163: note = MG4-250 HNH domain
EMKKPKWRRKQISKRNRENETGRKQAKEEIKRETQNPYPSPYDIRKLILYKECRGQCVYCGAQISRSNLFGDNSDSEVDHIIPFSRLQEDSFTHVVLCHARCNAEKGNRTPSEAFTGEEHERILDRVSRFDNDEATRKAKLRHFTLAGEELANYLNDFSSRQL

SEQ ID NO: 4285 - protein, 156 aa, unidentified
  REGION 1..156: note = Description of Unknown: uncultivated organism
  REGION 1..156: note = MG4-251 HNH domain
DLKSSNKERERRTFEIRKREKARAEIAERIAREAQIEKPSRNDILKVMLADECNFTCPYTGKNFSMKELLYGKDIQIEHIIPYSRSFDDSFRNKTLCFSSANAKKNNRTPFEAFSGAEYEEILQRVGKFKWPFAEDKKDLFKCEKVDSEEFLARNL

SEQ ID NO: 4286 - protein, 156 aa, unidentified
  REGION 1..156: note = Description of Unknown: uncultivated organism with predicted taxonomy: Bdellovibrio exovorus
  REGION 1..156: note = MG4-252 HNH domain
DLKNTNKEKERITKQNREKEKERVKIIQQIIKEVGIASPTRNDILKVQLAEECGFECPYTGKHFSMAQLFDGNTIQIEHIIPFSRSFDDSYRNKTLCMATENGRKNNRTPYEAYAKEEYKAILTRVSHFKGPFRESKLQIFETKEFSPDDFLQRNL

SEQ ID NO: 4287 - protein, 156 aa, unidentified; identical to SEQ ID NO: 4285
  REGION 1..156: note = Description of Unknown: uncultivated organism
  REGION 1..156: note = MG4-253 HNH domain

SEQ ID NO: 4288 - protein, 156 aa, unidentified
  REGION 1..156: note = Description of Unknown: uncultivated organism
  REGION 1..156: note = MG4-254 HNH domain
DLKSSAKERERRMWEMRQREKERTAIAGKIAEEAGIENPSRNDILKVMLAEECGYECPYTGKHFSMRDLLHGKDIHIEHIIPYSRSFDDSYRNKTLCLASANAAKNNRTPFEAFSGKEYQDILQRVARFRGPFAEAKLALFKLEKVEPEEFLERNL

SEQ ID NO: 4289 - protein, 156 aa, unidentified; identical to SEQ ID NO: 4285
  REGION 1..156: note = Description of Unknown: uncultivated organism
  REGION 1..156: note = MG4-255 HNH domain

SEQ ID NO: 4290 - protein, 156 aa, unidentified; identical to SEQ ID NO: 4285
  REGION 1..156: note = Description of Unknown: uncultivated organism
  REGION 1..156: note = MG4-256 HNH domain

SEQ ID NO: 4291 - protein, 161 aa, unidentified
  REGION 1..161: note = Description of Unknown: uncultivated organism with predicted taxonomy: Planctomycetes
  REGION 1..161: note = MG4-257 HNH domain
DIKRNREERQNINKKISERTKEREAARTRLQEDFNLADPKSSDIEKYLLWQESGPKCPYCGNPIAGEVLFSGATHIDHIIPRKVSLDNSFVNKVLCCSKCNNDKSDRTPHEAFNGDTQRWEKIAERVGAFRSEYRREKLRRVLMTKKEAQEFYTGFTDSQL

SEQ ID NO: 4292 - protein, 160 aa, unidentified
  REGION 1..160: note = Description of Unknown: uncultivated organism
  REGION 1..160: note = MG4-258 HNH domain
DLKRNAKQREMNWRRGRDRETVRTAAVKRILDEAHRPQPWKQDVDRVLLLEECRDLCVYCGQAISFQRLFDGDIDIDHILPRNRFPDDSFANRCLAHRACNQLKLGRTPYEAFGSDEELWPNIIARVKTWDNPDKLERFNLRDDGEFDPEREDSFAARRL

SEQ ID NO: 4293 - protein, 157 aa, unidentified
  REGION 1..157: note = Description of Unknown: uncultivated organism with predicted taxonomy: Acidobacteria
  REGION 1..157: note = MG4-259 HNH domain
ELRKSRKERENVTKRNRSRERERQQAKARILQECGLQNPSRADIEKALLFEECGGVCPYTGRTIEFSSLFRDSQFDVEHIIPLSRYPDDSFLNKTLCYHEENRSVKRGRTPWEAYGPDSERWDAILSRVQGFNNPAKLTRFKLRTEEELGEFTQRQM

SEQ ID NO: 4294 - protein, 161 aa, unidentified
  REGION 1..161: note = Description of Unknown: uncultivated organism with predicted taxonomy: Planctomycetes bacterium
  REGION 1..161: note = MG4-260 HNH domain
DLKKPRHERAEAITKNRNREKERVAAKTKLLQELGPGFEHPSRADVEKALLHEECGGVCPYTGRHIEFASLFGENPQFDVEHIIPFSRIPDDSFQNKTLCYHEENRLVKRNMTPFEVYKDPAQYEAILNRVRTWKKLNPGKQRRFELRTLEELEGFSARQL

SEQ ID NO: 4295 - protein, 157 aa, unidentified
  REGION 1..157: note = Description of Unknown: uncultivated organism
  REGION 1..157: note = MG4-261 HNH domain
DLKASNKEREQITKRNQQRERERNAIAERIIKETGLEKISRKDILKVMLADECDFTCPYSGKRFSMTELLNGGLVEVEHIIPFSRSFDDSFANKTLCVRELNAKKNNRTPFEAFGGSPQYSEMLTRVKYFKGHFAEHKLNLFKLAEIESSGFLERNL

SEQ ID NO: 4296 - protein, 154 aa, unidentified
  REGION 1..154: note = Description of Unknown: uncultivated organism with predicted taxonomy: Planctomycetes
  REGION 1..154: note = MG6-7 HNH domain
DVKGNAKEREELRIKMNRNEKENERARHELIHNMGITRPTRDDILKYKLWQECGRECPYTGRPISQQALFGEHPEFQIEHIIPYSRCLDDSFMNKTLCYVDENRRKGDQTPYEFYKNSDQYEHMLQRIRKLPYPKRQKFTQKEVSLDEFIKRQL

SEQ ID NO: 4297 - protein, 155 aa, unidentified
  REGION 1..155: note = Description of Unknown: uncultivated organism with predicted taxonomy: Planctomycetes bacterium
  REGION 1..155: note = MG6-8 HNH domain
DVKGSVKERDEIRVKQWKNEQENKRAEEELKLMGIRNPSFNDRLKYKLWEECGKECPYTGKPISQHQLFGEHPDIQIEHILPYSRTLDDSYMNKTLCYVNENRLKGNETPYEYYAENRVEQWEEILQRIKVLPYAKRRRFWQKEVVLDNFIQRQL

SEQ ID NO: 4298 - protein, 155 aa, unidentified
  REGION 1..155: note = Description of Unknown: uncultivated organism
  REGION 1..155: note = MG6-9 HNH domain
DVKGSLKEREEIQWKMRENEKRNEAARTRLIQDMDILNPSRDDVIKYKLWEECGKRCPYTGKVISLTDLFGSNPVFQVEHILPYSRSLDDSYMNKTLCCVNENRIKGNKTPYEFYSGDEEKYEQVKQQIKVLPWPKRRRFLQKEIKLDECIQREM

SEQ ID NO: 4299 - protein, 156 aa, unidentified
  REGION 1..156: note = Description of Unknown: uncultivated organism with predicted taxonomy: Planctomycetes bacterium
  REGION 1..156: note = MG6-10 HNH domain
DLKGSLRERKEIHFKQKENERENKRVRERLKNDFNHVSLNRDNIIKYKLWEECNGLCPYTGKKIPQYALFGENPEFQIEHILPYSRSLDDSYMNKTLCEVHENISVKGNQTPYEAYHHDEEKYEQIKQRIKVLPWPKRRKFLQKEIELDEAITREL

SEQ ID NO: 4300 - protein, 155 aa, unidentified; identical to SEQ ID NO: 4297
  REGION 1..155: note = Description of Unknown: uncultivated organism with predicted taxonomy: Planctomycetes bacterium
  REGION 1..155: note = MG6-11 HNH domain

SEQ ID NO: 4301 - protein, 155 aa, unidentified; identical to SEQ ID NO: 4298
  REGION 1..155: note = Description of Unknown: uncultivated organism
  REGION 1..155: note = MG6-12 HNH domain

SEQ ID NO: 4302 - protein, 156 aa, unidentified; identical to SEQ ID NO: 4299
  REGION 1..156: note = Description of Unknown: uncultivated organism with predicted taxonomy: Planctomycetes bacterium
  REGION 1..156: note = MG6-13 HNH domain

SEQ ID NO: 4303 - protein, 165 aa, unidentified
  REGION 1..165: note = Description of Unknown: uncultivated organism
  REGION 1..165: note = MG6-20 HNH domain
EIKGSLRQRAEIRDQQEASRKDREEIRTMLRDPIEFGKDNPSNDDILAYRLWEQQGHLSPYSGKTICQTDLRRFLNGEGVLEIDHILPYSKSWDNSQSNKCLCFSDENKNKKDFTPRQWLGDGTDAYTSMLQYVAGMKTTGMPFSKRRKFSQLEVDPEDCAKRQL

SEQ ID NO: 4304 - protein, 175 aa, unidentified
  REGION 1..175: note = Description of Unknown: uncultivated organism with predicted taxonomy: Arcicella aurantiaca
  REGION 1..175: note = MG7-2 HNH domain
ELKQNIKQRERTERNNNKRQKARKDVVKEILKTFPDMKEKDVTNRMIQKYELFQETNGICVYTGTEMKLGAVLSGQGFDIEHIIPKSRRFDDSFMNKTLADSSTNRDKNDLTAYDFMRKKGMTSFEKFTEIIHKLHKDKKISDTKLDNLLTTLNPVWIAEQEAKALSTDFINRQL

SEQ ID NO: 4305 - protein, 175 aa, unidentified
  REGION 1..175: note = Description of Unknown: uncultivated organism with predicted taxonomy: Flavobacteriales
  REGION 1..175: note = MG7-5 HNH domain
ELKQNIKQRERTESNNNKRQKARKDVVKEILKTFPDMKEKEVTQRMIQKYELFQETNGICVYTGTEMKLGAVLAGQGYDIEHIIPKSRRFDDSFMNKTLADSSTNRDKNDLTAYDFMRNKGMTAFEKFTEIIHTLHKNKKISDAKLDNLLTTLNPVWIAEKEAKELSTDFISRQL

SEQ ID NO: 4306 - protein, 175 aa, unidentified
  REGION 1..175: note = Description of Unknown: uncultivated organism with predicted taxonomy: Arcicella aurantiaca
  REGION 1..175: note = MG7-6 HNH domain
ELKQNIKQRERTESNNNKRQKARKDVVKEILKTFPDMKEKEVTQRMIQKYELFQETNGICIYTGTEMKLGAVLSGQGYDIEHIIPKSRRFDDSFMNKTLADSSTNRDKNDLTAYDFMRNKGTTAFEKFTEIIHKLHKDKKISDTKLDNLLTTLNPVWIAEQEAKALSTDFISRQL

SEQ ID NO: 4307 - protein, 167 aa, unidentified
  REGION 1..167: note = Description of Unknown: uncultivated organism
  REGION 1..167: note = MG7-9 HNH domain
ELKQSAQERKKTHELNQKRRRENERIKKDIADHLAIPPEKVTRAQIEKYRFYKEIDGISLYTGKRFSLADVLNGDTVDVEHIIPRTLRFDDSYHNKTLCERNINQEKGNMTACDYMRSRGAQEYEAYLERVKAFYEKNGREVRLKYKNLTTTQEDLLKDNEFLQRQL

SEQ ID NO: 4308 - protein, 169 aa, unidentified
  REGION 1..169: note = Description of Unknown: uncultivated organism with predicted taxonomy: Bacteroidetes
  REGION 1..169: note = MG7-10 HNH domain
ELKQSAQERQQIEKLINKNKKTNEEARKKIAEILGIDPQAVSRTMIEKWKLYEETDGLSLYSGKKIDLPTLLRGNAVDIDHIIPRVSRFDDSFQNKIFCEASLNQAKSNSTAHDFMRDQPVSGLQPYDDYRKMVKDLYEGKKISKAKYDNLMMTAEDLLKDGEFLQRQL

SEQ ID NO: 4309 - protein, 163 aa, unidentified
  REGION 1..163: note = Description of Unknown: uncultivated organism with predicted taxonomy: Bacteroidetes
  REGION 1..163: note = MG7-11 HNH domain
ELKQNAEERNKTFSRNKKEDAKHKDIIHRLMTECNFKKVSRRDIERYKLWEEFGYVSPYEPSKPISLSELFSGAYEVEHIIPKSRLFDDSFANKTICPRPINAAKDNQTAFDYMSGLGQQKLDEFTDFIQKHKTKKDGISQTKAKYLLCKGSEIPQDFINRQM

SEQ ID NO: 4310 - protein, 169 aa, unidentified
  REGION 1..169: note = Description of Unknown: uncultivated organism with predicted taxonomy: Bacteroidetes
  REGION 1..169: note = MG7-12 HNH domain
ELKQSAQERQQIEKLINKNKKTNEEARKKIAEILGIDPQAVSRTMIEKWKLYEETDGLSLYSGKKIDLPTLLRGNAVDIDHIIPRVSRFDDSFQNKIFCEASLNQAKSNSTAHDFMRDQPVSGLQPYDDYRKMVKDLYEGKKISKAKYDNLMMTAEDLLKDEEFLQRQL

SEQ ID NO: 4311 - protein, 153 aa, unidentified
  REGION 1..153: note = Description of Unknown: uncultivated organism with predicted taxonomy: Deltaproteobacteria bacterium
  REGION 1..153: note = MG7-13 HNH domain
ELKQTAKQRQKTSKQIRAREQQREAARNRLIEEGILTRPSRADIDRYLIWLEGNQMCPYTFKPIPISDLFNGRCDVDHIIPRSRLFDDSQLNKVVCYAAANREKGNRTAYEYMEQKGELEKFREHVMNTNYPFPKKKRLLSPEVPEDFIQRQL

SEQ ID NO: 4312 - protein, 153 aa, unidentified
  REGION 1..153: note = Description of Unknown: uncultivated organism with predicted taxonomy: Deltaproteobacteria bacterium
  REGION 1..153: note = MG7-14 HNH domain
ELKQTAKQRQKTSKQIRAREQQREAARNRLIEEGILTRPSRADIDRYLIWLEGNQMCPYTFKPIPISDLFNGRCDVDHIIPRSRLFDDSQLNKVVCYAAANKEKGNRTAYEYMEQKGELEKFREHVMNTNYPFPKKKRLLSPEVPEDFIQRQL

SEQ ID NO: 4313 - protein, 163 aa, unidentified
  REGION 1..163: note = Description of Unknown: uncultivated organism with predicted taxonomy: Collinsella
  REGION 1..163: note = MG14-1 HNH domain
ELRLPQRAKDEIAKANKKNEKNRERIAGQIAELRGCTADEVTGKQIEKYRLWEEQEYFDLYTGAKIEVDRLISDDTYTQIDHILPFSRTGENSRNNKVLVLAKSNQDKREQTPYEWMSHDGAPSWDAFERRVQENQKLSRRKKNFLLEKDLDTKEGEFLARSF

SEQ ID NO: 4314 - protein, 172 aa, unidentified
  REGION 1..172: note = Description of Unknown: uncultivated organism
  REGION 1..172: note = MG14-3 HNH domain
ELKHSAHEKRLINASKNKNEKVNAKARQDLIDYYHLPSDAHIKTGDFRKVKLYNEQGGKDPYTGEGIDFARMLAQSDYTEIDHILPISRSCDDSQSNKVLVLTKSNRDKSNRTPYEWMTSGESTAPDFAEFSARMQLWAENCELKRLASSKLKKLLNKDFTDKTQDFIARQL

SEQ ID NO: 4315 - protein, 165 aa, unidentified
  REGION 1..165: note = Description of Unknown: uncultivated organism with predicted taxonomy: Coriobacteriales
  REGION 1..165: note = MG14-4 HNH domain
ELRLPQCAKDDIAKANKKNEKNRERIAGQIAELRGCSVEEVTGKQIEKYRLWEEQECFDLYTGDSIDVMRLIQDDSYTQIDHILPFSRTGENSKNNKVLVLAKSNQDKREQTPYEWMHSGKPSAPSWSDFERRVQENQKLSRRKKNFLLEKDLDSKEGEFLARSF

SEQ ID NO: 4316 - protein, 165 aa, unidentified; identical to SEQ ID NO: 4315
  REGION 1..165: note = Description of Unknown: uncultivated organism with predicted taxonomy: Actinobacteria
  REGION 1..165: note = MG14-5 HNH domain

SEQ ID NO: 4317 - protein, 172 aa, unidentified
  REGION 1..172: note = Description of Unknown: uncultivated organism with predicted taxonomy: Collinsella
  REGION 1..172: note = MG14-6 HNH domain
ELKHSAHEKRLINASKNKNEKINAKARQDLIDYYHLPSDAHIKTGDFRKVKLYNEQGGKDAYTGEGIDFARMLAQSDYTEIDHILPISRSCDDSQSNKVLVLTKSNRDKSNRTPYEWMTSGESTAPDFAEFSARMQLWAENCELKRLASSKLKKLLNKDFTDKTQDFIARQL

SEQ ID NO: 4318 - protein, 163 aa, unidentified
  REGION 1..163: note = Description of Unknown: uncultivated organism with predicted taxonomy: Collinsella
  REGION 1..163: note = MG14-7 HNH domain
ELRLPQRAKDEIAKANKKNEKNRERIARQIAELRGCTADEVTGKQIEKYRLWEEQECFDLYTGAKIEVDRLISDGTYTQIDHILPFSRTGENSRNNKVLVLAKSNQDKREQTPYEWMSHDGAPSWDAFERRVQENQKLSRRKKNFLLEKDLGTKEGEFLARSF

SEQ ID NO: 4319 - protein, 165 aa, unidentified
  REGION 1..165: note = Description of Unknown: uncultivated organism with predicted taxonomy: Olsenella
  REGION 1..165: note = MG14-8 HNH domain
ELKMSNKEKSLVDKRNRENAANNKKWAATAAGILGCTPEEVPGRIIRKLILREEQGEKDLYTGEPIDLEHLVRDDRYCEIDHILPYSRTCDDGRANKVLVLSKSNQDKRERTPYEWMSSGEAGAPSWDSYRARVMAQVKNPRKRANYLNTDLGPETQAKFLARNL

SEQ ID NO: 4320 - protein, 165 aa, unidentified
  REGION 1..165: note = Description of Unknown: uncultivated organism with predicted taxonomy: Olsenella sp. KH3B4
  REGION 1..165: note = MG14-9 HNH domain
ELKMSNKEKSLVDKRNRENAAANKKWAEKAAGILGCTPEEVSGRVIRKLILREEQGEKDLYTGQPIDLERLVRDDRYCEIDHILPYSRTCDDSRTNKVLVLSKSNQDKRERTPYEWMTSGETGAPSWDEYHARIMATVKNPRKRANYLNTDLGPETQAKFLARNL

SEQ ID NO: 4321 - protein, 163 aa, unidentified
  REGION 1..163: note = Description of Unknown: uncultivated organism with predicted taxonomy: Collinsella
  REGION 1..163: note = MG14-10 HNH domain
ELRLPQRAKDDIAKAHKKNEKNRERIAGQIAELRGCSPEDVSGKLIEKYRLWEEQEYFDLYTGTKIEVDRLISDETYTQIDHILPFSRTGENSPSNKVLVLAKSNQDKREQTPFEWMSKEGAPSWDAFKRRVEENQKLGRRKKNFLLEEDLEAKEGEFLTRSF

SEQ ID NO: 4322 - protein, 172 aa, unidentified
  REGION 1..172: note = Description of Unknown: uncultivated organism with predicted taxonomy: Collinsella sp. AF20-14LB
  REGION 1..172: note = MG14-11 HNH domain
DLKHTKREKKLITSGNIYNRKVNEKAKDDIVEFLGLANADRVRGRDLEKVRLYNEQGGKDPYTGQGIDFGRMLTEKSYVEVDHVLPFSRSCDNSKTNKVLVLTKSNRDKANRTPYEWMTSGEPTAPNWDEFCIRMDVWASGKEPKHYYSSKLAKLKEDNFTNNIDSFISRNL

SEQ ID NO: 4323 - protein, 163 aa, unidentified
  REGION 1..163: note = Description of Unknown: uncultivated organism with predicted taxonomy: Collinsella
  REGION 1..163: note = MG14-12 HNH domain
ELRLPQRAKDEIAKANKKNEKNRERIAGQIAELRGCTTEEVTGKQIEKYRLWEEQECFDLYTGAKIEVDRLISDDTYTQIDHILPFSRTGENSRNNKVLVLAKSNQDKRGQTPYEWMSHDGAPSWDAFERRVQENQKLSRRKKNFLLEKDLDAKEGEFLARSF

SEQ ID NO: 4324 - protein, 163 aa, unidentified; identical to SEQ ID NO: 4323
  REGION 1..163: note = Description of Unknown: uncultivated organism with predicted taxonomy: Collinsella
  REGION 1..163: note = MG14-13 HNH domain

SEQ ID NO: 4325 - protein, 165 aa, unidentified
  REGION 1..165: note = Description of Unknown: uncultivated organism with predicted taxonomy: Olsenella
  REGION 1..165: note = MG14-14 HNH domain
ELKMSNKEKSLVDKRNRENAANNKKWAATAAGILGCTPEEVPGRIIRKLILREEQGEKDLYTGEPIDLEHLVRDDRYCEIDHILPYSRTCDDGRANKVLVLSKSNQDKRERTPYEWMTSGEAGAPSWDSYRARVMAQVKNPRKRANYLNTDLGPETQAKFLARNL

SEQ ID NO: 4326 - protein, 163 aa, unidentified; identical to SEQ ID NO: 4323
  REGION 1..163: note = Description of Unknown: uncultivated organism with predicted taxonomy: Coriobacteriales
  REGION 1..163: note = MG14-15 HNH domain

SEQ ID NO: 4327 - protein, 172 aa, unidentified
  REGION 1..172: note = Description of Unknown: uncultivated organism with predicted taxonomy: Eggerthellales
  REGION 1..172: note = MG14-16 HNH domain
ELKRSKHEREVVAESNRARRELNEQAKRDIVEFLGLPDDHHVRGRDLDMVKLYREQGGKDPYTGAGIDFRRMLEEHGYAEIDHILPISRTCDDSQANKVLCLTKSNRDKSNRSPYEWMTSGEAAAPDWDEFCGRMDRWAKMCEPRRYVRKKLANLTCENLAEHAEDFIKRNL

SEQ ID NO: 4328 - protein, 163 aa, unidentified; identical to SEQ ID NO: 4323
  REGION 1..163: note = Description of Unknown: uncultivated organism with predicted taxonomy: Collinsella
  REGION 1..163: note = MG14-17 HNH domain

SEQ ID NO: 4329 - protein, 165 aa, unidentified
  REGION 1..165: note = Description of Unknown: uncultivated organism with predicted taxonomy: Olsenella
  REGION 1..165: note = MG14-18 HNH domain
DLKMSNKEKKQVEKRNRENAANNKKWATTAAGILGCTPEEVPGRIIRKLILREEQGEKDLYTGDSIDLEHLVRDDRYCEIDHILPYSRTCDDSRANKVLVLSKSNQDKRERTPYEWMTSGEAGAPSWDSYRARVMAQVKNPRKRANYLNTDLGPETQAKFLARNL

SEQ ID NO: 4330 - protein, 163 aa, unidentified
  REGION 1..163: note = Description of Unknown: uncultivated organism with predicted taxonomy: Coriobacteriales
  REGION 1..163: note = MG14-19 HNH domain
ELRLPQRAKDEIAKANKKNEKNRERIAGQIAELRGCTTEEVTGKQIEKYRLWEEQECFDLYTGAKIEVDRLISDDTYTQIDHILPFSRTGENSRNNKVLVLAKSNQDKRGQTPYEWMSHDGAPSWDAFERRVQENQKLSRRKKNFLLEKNLDAKEGEFLARSF

SEQ ID NO: 4331 - protein, 163 aa, unidentified; identical to SEQ ID NO: 4323
  REGION 1..163: note = Description of Unknown: uncultivated organism with predicted taxonomy: Coriobacteriales
  REGION 1..163: note = MG14-20 HNH domain

SEQ ID NO: 4332 - protein, 165 aa, unidentified; identical to SEQ ID NO: 4325
  REGION 1..165: note = Description of Unknown: uncultivated organism with predicted taxonomy: Olsenella sp. KH3B4
  REGION 1..165: note = MG14-21 HNH domain

SEQ ID NO: 4333 - protein, 163 aa, unidentified; identical to SEQ ID NO: 4323
  REGION 1..163: note = Description of Unknown: uncultivated organism with predicted taxonomy: Collinsella
  REGION 1..163: note = MG14-22 HNH domain

SEQ ID NO: 4334 - protein, 163 aa, unidentified; identical to SEQ ID NO: 4323
  REGION 1..163: note = Description of Unknown: uncultivated organism with predicted taxonomy: Collinsella
  REGION 1..163: note = MG14-23 HNH domain

SEQ ID NO: 4335 - protein, 163 aa, unidentified
  REGION 1..163: note = Description of Unknown: uncultivated organism with predicted taxonomy: Collinsella
  REGION 1..163: note = MG14-24 HNH domain
ELRLPQRAKDDIAKAHKKNEKNRERIAGQIAELRGCNPEDVSGRLIEKYRLWEEQECFDLYTGAKIEVDRLISDETYTQIDHILPFSRTGENSPSNKVLVLAKSNQDKREQTPFEWMSKEGAPSWDAFKRRVEENQKLGRRKKNFLLEEDLEAKEGEFLTRSF

SEQ ID NO: 4336 - protein, 165 aa, unidentified
  REGION 1..165: note = Description of Unknown: uncultivated organism with predicted taxonomy: Olsenella
  REGION 1..165: note = MG14-25 HNH domain
ELKMSNKEKSLVDKRNRENAANNKKWAATAAGILGCTPEEVPGRIIRKLILREEQGEKDLYTGEPIDLEHLVRDDRYCEIDHILPYSRTCDDGRANKVLVLSKSNQDKRERTPYEWMTSGETSAPSWDSYRARVMAQVKNPRKRANYLNTDLGPETQAKFLARNL

SEQ ID NO: 4337 - protein, 163 aa, unidentified; identical to SEQ ID NO: 4323
  REGION 1..163: note = Description of Unknown: uncultivated organism with predicted taxonomy: Coriobacteriia
  REGION 1..163: note = MG14-26 HNH domain

SEQ ID NO: 4338 - protein, 163 aa, unidentified; identical to SEQ ID NO: 4323
  REGION 1..163: note = Description of Unknown: uncultivated organism with predicted taxonomy: Collinsella
  REGION 1..163: note = MG14-27 HNH domain

SEQ ID NO: 4339 - protein, 172 aa, unidentified
  REGION 1..172: note = Description of Unknown: uncultivated organism with predicted taxonomy: Collinsella
  REGION 1..172: note = MG14-28 HNH domain
ELKHTKHEKKLVDDGNKYNKREKEKAADDIVEYLGLSSADQVRGRDIDKVRLYNEQGGKDLYTGQGIDFGRMLTEKGYVEIDHILPYSRSCDNSRTNKVLVLTKSNRDKANRTPYEWMTSGEPTAPNWDEFCIRMDVWASGKEPKHYYSSKLAKLKEDNFTNNIDSFISRNL

SEQ ID NO: 4340 - protein, 163 aa, unidentified; identical to SEQ ID NO: 4323
  REGION 1..163: note = Description of Unknown: uncultivated organism with predicted taxonomy: Coriobacteriales
  REGION 1..163: note = MG14-29 HNH domain

SEQ ID NO: 4341 - protein, 163 aa, unidentified; identical to SEQ ID NO: 4330
  REGION 1..163: note = Description of Unknown: uncultivated organism with predicted taxonomy: Collinsella
  REGION 1..163: note = MG14-30 HNH domain

SEQ ID NO: 4342 - protein, 161 aa, unidentified
  REGION 1..161: note = Description of Unknown: uncultivated organism with predicted taxonomy: Coriobacteriia bacterium
  REGION 1..161: note = MG14-31 HNH domain
ELKQSAKEKDAILKSNNKTNKSREVLRKKLAEELSCDEDAIPFKLLEKIELWNQQDGRDLYVDEPIQYERLISDDSYCEIDHILPYSRTCDDSRMNKILVLQKSNQNKRESTPFEWMSATGDWDNFKLRILRLAHYPQKKKQRLLNTDLAEKQPEFIARNL

SEQ ID NO: 4343 - protein, 165 aa, unidentified
  REGION 1..165: note = Description of Unknown: uncultivated organism with predicted taxonomy: Olsenella sp. KH3B4
  REGION 1..165: note = MG14-32 HNH domain
DLKMSNKEKKQVEKRNRENAANNKKWATTAAGILGCTPEEVPGRIIRKLILREEQGEKDLYTGDSIDLEHLVRDDRYCEIDHILPYSRTCDDSRANKVLVLSKSNQDKRERTPYEWMTSGETSAPSWDSYRARVMAQVKNPRKRANYLNTDLGPETQAKFLARNL

SEQ ID NO: 4344 - protein, 163 aa, unidentified; identical to SEQ ID NO: 4323
  REGION 1..163: note = Description of Unknown: uncultivated organism with predicted taxonomy: Collinsella
  REGION 1..163: note = MG14-33 HNH domain

SEQ ID NO: 4345 - protein, 165 aa, unidentified
  REGION 1..165: note = Description of Unknown: uncultivated organism with predicted taxonomy: Olsenella
  REGION 1..165: note = MG14-34 HNH domain
DLKMSNKEKKQVEKRNRENAASNKKWATTAAGILGCTPEEVPGRIIRKLILREEQGEKDLYTGDSIDLEHLVRDDRYCEIGHILPYSRTCDDSRANKVLVLSKSNQDKRERTPYEWMTSGETSAPSWDSYRARVMAQVKNPRKRANYLNTDLGPETQAKFLARNL

SEQ ID NO: 4346 - protein, 167 aa, unidentified
  REGION 1..167: note = Description of Unknown: uncultivated organism with predicted taxonomy: Olsenella sp. KH3B4
  REGION 1..167: note = MG14-35 HNH domain
DLKMSKREKDAVSKRQRQNEATNKKWAKTAAGILGCEPEEVPGKVIRKLAMREEQGEKDAYTNAPIDLERLVREDHYCEIDHILPYSRTSEDSRANKVLVLSKSNQDKRERTPYEWMTQDVGKPGVPNWDEYHARVVATVKHPRKRANLLNTDLGPETEAKFLARNL

SEQ ID NO: 4347 - protein, 163 aa, unidentified
  REGION 1..163: note = Description of Unknown: uncultivated organism with predicted taxonomy: Coriobacteriales
  REGION 1..163: note = MG14-36 HNH domain
ELRLPQRAKDEIAKANKKNEKNRERIAGQIAELRGCTADEVTGKQIEKYRLWEEQECFDLYTGAKIEVDRLISDDTYTQIDHILPFSRTGENSRNNKVLVLAKSNQDKREQTPYEWMSHDGAPSWDAFERRVQENQKLSRRKKNFLLEKDLDTKEGEFLARSF

SEQ ID NO: 4348 - protein, 172 aa, unidentified
  REGION 1..172: note = Description of Unknown: uncultivated organism with predicted taxonomy: Coprococcus comes
  REGION 1..172: note = MG14-37 HNH domain
DLKRSKHEKAIIAATNKANKDSNEQAKKDLVAFYGLPNDAHVSSADFEKMWLYREQFGQDPYTGKGINLERMLNERDYVEIDHILPFSRSCDDSKSNKVLCLTKSNRDKANRTPYEWMTSGEPSAPDFGDFCRRMDAWAGKGKSAHYTKSKLSKLKNSTFGKEEQKFIDRNL

SEQ ID NO: 4349 - protein, 163 aa, unidentified
  REGION 1..163: note = Description of Unknown: uncultivated organism with predicted taxonomy: Coriobacteriia bacterium
  REGION 1..163: note = MG14-38 HNH domain
ELRLPQRAKDEIAKANKKNEKNRERIARQIAELRGCTADEVTGKQIEKYRLWEEQECFDLYTGAKIEVDRLISDDTYTQIDHILPFSRTGENSRSNKVLVLAKSNQDKREQTPYEWMSHDGAPSWDAFERRVQENQKLSRRKKNFLLEKDLDTKEGEFLARSF

SEQ ID NO: 4350 - protein, 163 aa, unidentified; identical to SEQ ID NO: 4347
  REGION 1..163: note = Description of Unknown: uncultivated organism with predicted taxonomy: Collinsella
  REGION 1..163: note = MG14-39 HNH domain

SEQ ID NO: 4351 - protein, 172 aa, unidentified
  REGION 1..172: note = Description of Unknown: uncultivated organism
  REGION 1..172: note = MG14-40 HNH domain
DLKRSKHEKAIIAATNKANKDSNEQVKKDLVAFYGLPNDAHVSSTDFEKMWLYREQFGQDPYTGKGINLERMLNDRDYVEIDHILPFSRSCDDSKSNKVLCLTKSNRDKANRTPYEWMTSGEPSAPDFGDFCGRMDAWAGKGKSAHYTKSKLSKLKNSTFGKEEQKFIDRNL

SEQ ID NO: 4352 - protein, 163 aa, unidentified
  REGION 1..163: note = Description of Unknown: uncultivated organism with predicted taxonomy: Collinsella
  REGION 1..163: note = MG14-41 HNH domain
ELRLPQRAKDEIAKANKKNEKNRERIAGQIAELRGCTADEVTGKQIEKYRLWEEQECFDLYTGAKIEVDRLISDDTYTQIDHILPFSRTGENSRNNKVLVLAKSNQDKREQTPYEWMSHDGAPSWDAFERRVQENQKLSRRKKNFLLEKDLDAKEGDFLARSF

SEQ ID NO: 4353 - protein, 163 aa, unidentified
  REGION 1..163: note = Description of Unknown: uncultivated organism with predicted taxonomy: Collinsella
  REGION 1..163: note = MG14-42 HNH domain
ELRLPQRAKDEIAKANKKNEKNRERIAGQIAELRGCTADEVTGKQIEKYRLWEEQECFDLYTGTKIEVDRLISDDTYTQIDHILPFSRTGENSRNNKVLVLAKSNQDKREQTPYEWMSHDGAPSWNAFERRVQENQKLSRRKKNFLLEKDLDTKEGEFLARSF

SEQ ID NO: 4354 - protein, 163 aa, unidentified
  REGION 1..163: note = Description of Unknown: uncultivated organism with predicted taxonomy: Collinsella
  REGION 1..163: note = MG14-43 HNH domain
ELRLPQRAKDEIAKANKKNEKNSERIAGQIAELRGCTADEVTGKQIEKYRLWEEQECFDLYTGAKIEVDRLISDDTYTQIDHILPFSRTGENSRNNKVLVLAKSNQDKREQTPYEWMSHDGAPSWDAFERRVQENQKLSRRKKNFLLEKDLDTKEGEFLARSF

SEQ ID NO: 4355 - protein, 163 aa, unidentified; identical to SEQ ID NO: 4352
  REGION 1..163: note = Description of Unknown: uncultivated organism with predicted taxonomy: Olsenella mediterranea
  REGION 1..163: note = MG14-44 HNH domain

SEQ ID NO: 4356 - protein, 163 aa, unidentified; identical to SEQ ID NO: 4352
  REGION 1..163: note = Description of Unknown: uncultivated organism with predicted taxonomy: Collinsella
  REGION 1..163: note = MG14-45 HNH domain

SEQ ID NO: 4357 - protein, 163 aa, unidentified; identical to SEQ ID NO: 4347
  REGION 1..163: note = Description of Unknown: uncultivated organism with predicted taxonomy: Collinsella
  REGION 1..163: note = MG14-46 HNH domain

SEQ ID NO: 4358 - protein, 172 aa, unidentified
  REGION 1..172: note = Description of Unknown: uncultivated organism with predicted taxonomy: Collinsella sp. AM13-34
  REGION 1..172: note = MG14-47 HNH domain
DLKRSKHEREIVAESNRARHELNEQAKRDIVEFLGLHDDDHVRGRDLDMVKLYREQGGKDPYTGTGIDFGRMLEERGYVEIDHILPISRTCDNSQANKVLCLTKSNRDKSNRSPYEWMTSGEATAPDWDEFCGRMERWAKMCEPRRYARKKLANLTCENLAERAGGFIDRNL

SEQ ID NO: 4359 - protein, 163 aa, unidentified; identical to SEQ ID NO: 4347
  REGION 1..163: note = Description of Unknown: uncultivated organism with predicted taxonomy: Collinsella
  REGION 1..163: note = MG14-48 HNH domain

SEQ ID NO: 4360 - protein, 172 aa, unidentified
  REGION 1..172: note = Description of Unknown: uncultivated organism with predicted taxonomy: Collinsella sp. AF20-14LB
  REGION 1..172: note = MG14-49 HNH domain
DLKRSKHEKAIIAATNKANKDSNEQAKKDLVAFYGLPNDAHVSSADFEKMWLYREQFGQDPYTGKGINLERMLNDRDYVEIDHILPFSRSCDDSKSNKVLCLTKSNRDKANRTPYEWMTSGEPSAPDFGDFCRRMDAWAGKGKSAHYTKSKLSKLKNSTFGKEEQKFIDRNL

SEQ ID NO: 4361 - protein, 165 aa, unidentified
  REGION 1..165: note = Description of Unknown: uncultivated organism with predicted taxonomy: Libanicoccus massiliensis
  REGION 1..165: note = MG14-50 HNH domain
ELKQSKREKDLATKRRNAREADNKRYAKLAADILGVEPEAVRGNIIRMLALREEQGCKDIYTGDRIDLERLVTDEHYCEIDHVLPYSRTCDDDQSNKTLTFASNNQNKRERTPYEWMTSDEEKAPNWEEYRNRVIAEVKNPRKRAKFLNTILDEDTQEGFINRNL

SEQ ID NO: 4362 - protein, 163 aa, unidentified
  REGION 1..163: note = Description of Unknown: uncultivated organism with predicted taxonomy: Collinsella
  REGION 1..163: note = MG14-51 HNH domain
ELRLPQRAKDEIAKANKKNEKNRERIAGQIAELRGCTADEVTGKQIEKYRLWEEQKCFDLYTGAKIEVDRLISDDTYTQIDHILPFSRTGENSRNNKVLVLAKSNQDKREQTPYEWMSHDGAPSWDAFERRVQENQKLSRRKKNFLLEKDLDTKEGEFLARSF

SEQ ID NO: 4363 - protein, 163 aa, unidentified
  REGION 1..163: note = Description of Unknown: uncultivated organism with predicted taxonomy: Collinsella
  REGION 1..163: note = MG14-52 HNH domain
ELRLPRRAKDEIAKANKKNEKNRERIARQIAELRGCTADEVTGKQIEKYRLWEEQECFDLYTGAKIEIGRLISDDTYTQIDHILPFSRTGENSRNNKVLVLAKSNQDKREQTPYEWMSHDGAPSWDAFERRVQENQKLSRRKKNFLLEKDLDTKEGEFLARSF

SEQ ID NO: 4364 - protein, 165 aa, unidentified
  REGION 1..165: note = Description of Unknown: uncultivated organism with predicted taxonomy: Olsenella sp. KH3B4
  REGION 1..165: note = MG14-53 HNH domain
DLKMSNKEKDLVDKRNRENEAAKKKWAKTAADILGIEPEEVPGRIVRKLIMREEQDNWDLYTGDAIDLERLVRDDRYCEIDHILPYSRTCDDSRANKVLVLSKSNQDKRERTPYEWMTSGEAGAPSWDEYRARVMALVKNPHKRANHLNTDLGEEAQAKFLARNL

SEQ ID NO: 4365 - protein, 165 aa, unidentified
  REGION 1..165: note = Description of Unknown: uncultivated organism with predicted taxonomy: Olsenella sp. KH3B4
  REGION 1..165: note = MG14-54 HNH domain
DLKMSNKEKSLVDKRNRENAASNKKWATTAAGILGCTPEEVPGRIIRKLILREEQGEKDLYTGDSIDLEHLVRDDRYCEIDHILPYSRTCDDSRANKTLVLSKSNQDKRERTPYEWMTSGEAGAPSWDSYRARVMAQVKNPRKRANYLNTDLGPETQAKFLARNL

SEQ ID NO: 4366 - protein, 172 aa, unidentified
  REGION 1..172: note = Description of Unknown: uncultivated organism with predicted taxonomy: Collinsella
  REGION 1..172: note = MG14-55 HNH domain
DLKRTEHERKLITSGNIYNRRTNEKAKDDIVEYLGLSDADQVRGRDIDKVRLYNEQGGKDPYTGQGIDFGRMLTEKGYVEIDHILPFSRSCDNARTNKVLVLTKSNRNKSNRTPYEWMTSGEPTAPNWDEFCIRMDVWASGKEPKHYYSSKLAKLKEDNFTNNIDSFISRNL

SEQ ID NO: 4367 - protein, 163 aa, unidentified
  REGION 1..163: note = Description of Unknown: uncultivated organism with predicted taxonomy: Collinsella
  REGION 1..163: note = MG14-56 HNH domain
ELRLPRRAKDEIAKANKKNEKNRERIARQIAELRGCTADEVTGKQIEKYRLWEEQECFDLYTGAKIEVGRLISDDTYTQIDHILPFSRTGENSRNNKVLVLAKSNQDKREQTPYEWMSHDGAPSWDAFERRVQENQKLGRRKKNFLLEKDLDTKEGEFLARSF

SEQ ID NO: 4368 - protein, 165 aa, unidentified
  REGION 1..165: note = Description of Unknown: uncultivated organism with predicted taxonomy: Olsenella
  REGION 1..165: note = MG14-57 HNH domain
DLKMSNKEKSLVDKRNRENAASNKKWATTAAGILGCTPEEVPGRIIRKLILREEQGEKDLYTGDSIDLEHLVRDDRYCEIDHILPYSRTCDDSRANKVLVLSKSNQDKRERTPYEWMTSGEAGAPSWDSYRARVIAQVKNPRKRANYLNTDLGPETQAKFLARNL

SEQ ID NO: 4369 - protein, 163 aa, unidentified; identical to SEQ ID NO: 4347
  REGION 1..163: note = Description of Unknown: uncultivated organism with predicted taxonomy: Collinsella
  REGION 1..163: note = MG14-58 HNH domain

SEQ ID NO: 4370 - protein, 163 aa, unidentified; identical to SEQ ID NO: 4349
  REGION 1..163: note = Description of Unknown: uncultivated organism with predicted taxonomy: Collinsella
  REGION 1..163: note = MG14-59 HNH domain

SEQ ID NO: 4371 - protein, 163 aa, unidentified; identical to SEQ ID NO: 4367
  REGION 1..163: note = Description of Unknown: uncultivated organism with predicted taxonomy: Collinsella
  REGION 1..163: note = MG14-60 HNH domain

SEQ ID NO: 4372 - protein, 163 aa, unidentified
  REGION 1..163: note = Description of Unknown: uncultivated organism with predicted taxonomy: Collinsella
  REGION 1..163: note = MG14-61 HNH domain
ELRLPQRAKDEIAKANKKNEKNRERIAGQIAELRGCTADEVTGKQIEKYRLWEEQECFDLYTGAKIEVDRLISDDTYTQIDHILPFSRTGENSRNNKVLVLAKSNQDKREQTPYEWMSHDGAPSWGAFERRVQENQKLSRRKKNFLLEKDLDTKEGEFLARSF

SEQ ID NO: 4373 - protein, 163 aa, unidentified; identical to SEQ ID NO: 4352
  REGION 1..163: note = Description of Unknown: uncultivated organism with predicted taxonomy: Collinsella
  REGION 1..163: note = MG14-62 HNH domain

SEQ ID NO: 4374 - protein, 172 aa, unidentified
  REGION 1..172: note = Description of Unknown: uncultivated organism with predicted taxonomy: Collinsella
  REGION 1..172: note = MG14-63 HNH domain
DLKRSKHEREIVAESNRARLELNEQAKRDIIEFLGLPDDHHVRGRDLALVKLYREQGGKDPYTGVGIDFRRMLEEHGYAEIDHILPVSRTCDDSQANKVLCLTKSNRDKSNRSPYEWMTSGEASAPDWNGFCGRMERWAKMCEPRRYARKKLANLTCENLAERAGNFIDRNL

SEQ ID NO: 4375 - protein, 163 aa, unidentified
  REGION 1..163: note = Description of Unknown: uncultivated organism with predicted taxonomy: Collinsella
  REGION 1..163: note = MG14-64 HNH domain
ELRLPQRAKDDIAKAHKRNEKNRERIAGQIAELRGCSPEDVSGRLIEKYRLWEEQECFDLYTGAKIEVDRLISDETYTQIDHILPFSRTGENSPSNKVLVLAKSNQDKREQTPFEWMSKEGAPSWDAFKRRVEENQKLGRRKKNFLLEENLEAKEGEFLARSF

SEQ ID NO: 4376 - protein, 163 aa, unidentified; identical to SEQ ID NO: 4367
  REGION 1..163: note = Description of Unknown: uncultivated organism with predicted taxonomy: Collinsella
  REGION 1..163: note = MG14-65 HNH domain

SEQ ID NO: 4377 - protein, 163 aa, unidentified; identical to SEQ ID NO: 4347
  REGION 1..163: note = Description of Unknown: uncultivated organism with predicted taxonomy: Collinsella
  REGION 1..163: note = MG14-66 HNH domain

SEQ ID NO: 4378 - protein, 163 aa, unidentified; identical to SEQ ID NO: 4347
  REGION 1..163: note = Description of Unknown: uncultivated organism with predicted taxonomy: Collinsella
  REGION 1..163: note = MG14-67 HNH domain

SEQ ID NO: 4379 - protein, 163 aa, unidentified; identical to SEQ ID NO: 4347
  REGION 1..163: note = Description of Unknown: uncultivated organism with predicted taxonomy: Collinsella
  REGION 1..163: note = MG14-68 HNH domain

SEQ ID NO: 4380 - protein, 167 aa, unidentified
  REGION 1..167: note = Description of Unknown: uncultivated organism with predicted taxonomy: Olsenella
  REGION 1..167: note = MG14-69 HNH domain
DLKRSKHEKDLINKRNRENERKNKQWRAQIAEEQGIDPDEVRPKLLRKIALWEEQDNFDIYTGHKIEFDRMISDDKYCEIDHVLPYSRTCDDSRNNKVLVLAKSNQDKRERTPYEWMTQDARKGAPNWDEYQARVIANHHISPRKRRYLLDNNLGPDQESDFLSRNL

SEQ ID NO: 4381 - protein, 165 aa, unidentified
  REGION 1..165: note = Description of Unknown: uncultivated organism with predicted taxonomy: Collinsella tanakaei
  REGION 1..165: note = MG14-70 HNH domain
ELRLPKKAKDEIAKAKKRNEKDRQRVAAQIAELLGCSADDVKGDYIEKYRLWEEQECFDIYSGEKIEVDRLIREETYTQIDHVLPFSRTGDNSRHNKVLVLARSNQLKREQTPYEWMTSNTEGAPSWDAFKRRVEENKKLSRRKKNFLLEEDLVSKEGEFQSRNM

SEQ ID NO: 4382 - protein, 163 aa, unidentified; identical to SEQ ID NO: 4347
  REGION 1..163: note = Description of Unknown: uncultivated organism with predicted taxonomy: Collinsella
  REGION 1..163: note = MG14-71 HNH domain

SEQ ID NO: 4383 - protein, 171 aa, unidentified
  REGION 1..171: note = Description of Unknown: uncultivated organism with predicted taxonomy: Atopobium sp. ICM42b
  REGION 1..171: note = MG14-72 HNH domain
DIAKSAKEKSKIAKGQNENRKENERIKDKIAEILHIDQSEVTGKQITKMKLYEEQGGKDIYTGEGLGDIAFAGGRRFLIDDNYCEIDHVLPYSRSADDLKSNKVLVLAKSNQEKGNRTPYEWMNSNDGSHPNWEQFCLRVLSNVRLSDGKKSKLLEENFAEKEVSFIKRNM

SEQ ID NO: 4384 - protein, 163 aa, unidentified
  REGION 1..163: note = Description of Unknown: uncultivated organism with predicted taxonomy: Collinsella
  REGION 1..163: note = MG14-73 HNH domain
ELRLPQRAKDEIAKANKKNEKNRERIAGQIAELRGCTADEVTGKQIEKYRLWEEQECFDLYTGAKIEVDRLISDDTYTQIDHILPFSRTGENSRNNKVLVLAKSNQDKREQTPYEWMSHDGAPSWDAFERRVQENQKLSRRKKNFLLEKDLDSKEGEFLARSF

SEQ ID NO: 4385 - protein, 172 aa, unidentified
  REGION 1..172: note = Description of Unknown: uncultivated organism with predicted taxonomy: Collinsella
  REGION 1..172: note = MG14-74 HNH domain
DLKRTEHEKKLITSGNIYNRRTNEKAKDDIVEYLGLSEADQVRGRDIDKVRLYNEQGGKDPYTGQGIDFGRMLTEKGYVEIDHILPFSRSCDNARTNKVLVLTKSNRDKSNRTPYEWMTSGEPTAPNWDEFCIRMDVWASGKEPKHYYSSKLAKLKEDNFTNNIDSFISRNL

SEQ ID NO: 4386 - protein, 172 aa, unidentified
  REGION 1..172: note = Description of Unknown: uncultivated organism with predicted taxonomy: Collinsella sp. AM13-34
  REGION 1..172: note = MG14-75 HNH domain
DLKRSKHEREIVAESNRARLELNEQAKRDIIEFLGLPDDHHVRGRDLALVKLYREQGGKDPYTGAGIDFRRMLEEHGYAEIDHILPVSRTCDDSQANKVLCLTKSNRDKSNRSPYEWMTSGEASAPDWGEFCGRMERWAKMCEPRRYARKKLANLTCENLTERAGNFIDRNL

SEQ ID NO: 4387 - protein, 163 aa, unidentified; identical to SEQ ID NO: 4347
  REGION 1..163: note = Description of Unknown: uncultivated organism with predicted taxonomy: Collinsella
  REGION 1..163: note = MG14-76 HNH domain

SEQ ID NO: 4388 - protein, 163 aa, unidentified
  REGION 1..163: note = Description of Unknown: uncultivated organism with predicted taxonomy: Collinsella
  REGION 1..163: note = MG14-77 HNH domain
ELRLPQRAKDEIAKTNKKNEKNRERIAGQIAELRGCTADEVTGKQIEKYRLWEEQECFDLYTGAKIEVDRLISDDTYTQIDHILPFSRTGENSRNNKVLVLAKSNQDKREQTPYEWMSHDGAPSWDAFERRVQENQKLSRRKKNFLLEKDLDTKEGEFLARSF

SEQ ID NO: 4389 - protein, 163 aa, unidentified
  REGION 1..163: note = Description of Unknown: uncultivated organism with predicted taxonomy: Collinsella
  REGION 1..163: note = MG14-78 HNH domain
ELRLPQRAKDEIAKANKKNEKNRERIAGQIAELRGCTADEVTGKQIEKYRLWEEQEYFDLYTGAKIEVDRLISDDTYTQIDHILPFSRTGENSRNNKVLVLAKSNQDKREQTPYEWMSHDGAPSWDAFVRRVQENQKLSRRKKNFLLEKDLDTKEGEFLARSF

SEQ ID NO: 4390 - protein, 163 aa, unidentified; identical to SEQ ID NO: 4347
  REGION 1..163: note = Description of Unknown: uncultivated organism with predicted taxonomy: Collinsella
  REGION 1..163: note = MG14-79 HNH domain

SEQ ID NO: 4391 - protein, 163 aa, unidentified; identical to SEQ ID NO: 4313
  REGION 1..163: note = Description of Unknown: uncultivated organism with predicted taxonomy: Coriobacteriales
  REGION 1..163: note = MG14-80 HNH domain

SEQ ID NO: 4392 - protein, 163 aa, unidentified; identical to SEQ ID NO: 4389
  REGION 1..163: note = Description of Unknown: uncultivated organism with predicted taxonomy: Collinsella
  REGION 1..163: note = MG14-82 HNH domain

SEQ ID NO: 4393 - protein, 163 aa, unidentified; identical to SEQ ID NO: 4321
  REGION 1..163: note = Description of Unknown: uncultivated organism with predicted taxonomy: Collinsella
  REGION 1..163: note = MG14-83 HNH domain

SEQ ID NO: 4394 - protein, 165 aa, unidentified; identical to SEQ ID NO: 4325
  REGION 1..165: note = Description of Unknown: uncultivated organism with predicted taxonomy: Olsenella
  REGION 1..165: note = MG14-84 HNH domain

SEQ ID NO: 4395 - protein, 163 aa, unidentified; identical to SEQ ID NO: 4347
  REGION 1..163: note = Description of Unknown: uncultivated organism with predicted taxonomy: Collinsella
  REGION 1..163: note = MG14-85 HNH domain

SEQ ID NO: 4396 - protein, 163 aa, unidentified; identical to SEQ ID NO: 4352
  REGION 1..163: note = Description of Unknown: uncultivated organism with predicted taxonomy: Collinsella
  REGION 1..163: note = MG14-87 HNH domain

SEQ ID NO: 4397 - protein, 163 aa, unidentified; identical to SEQ ID NO: 4352
  REGION 1..163: note = Description of Unknown: uncultivated organism with predicted taxonomy: Collinsella
  REGION 1..163: note = MG14-88 HNH domain

SEQ ID NO: 4398 - protein, 163 aa, unidentified; identical to SEQ ID NO: 4347
  REGION 1..163: note = Description of Unknown: uncultivated organism with predicted taxonomy: Collinsella
  REGION 1..163: note = MG14-89 HNH domain

SEQ ID NO: 4399 - protein, 163 aa, unidentified
  REGION 1..163: note = Description of Unknown: uncultivated organism with predicted taxonomy: Coriobacteriia
  REGION 1..163: note = MG14-90 HNH domain
ELRLPQRAKDEIAKANKKNEENRERIARQIAELRGCTADEVTGKQIEKYRLWEEQECFDLYTGAKIEVDRLISDDTYTQIDHILPFSRTGENSRNNKVLVLAKSNQDKREQTPYEWMSHDGAPSWDAFERRVQENQKLSRRKKNFLLEKDLDTKEGEFLARSF

SEQ ID NO: 4400 - protein, 165 aa, unidentified; identical to SEQ ID NO: 4381
  REGION 1..165: note = Description of Unknown: uncultivated organism with predicted taxonomy: Collinsella tanakaei
  REGION 1..165: note = MG14-91 HNH domain

SEQ ID NO: 4401 - protein, 163 aa, unidentified; identical to SEQ ID NO: 4352
  REGION 1..163: note = Description of Unknown: uncultivated organism with predicted taxonomy: Collinsella
  REGION 1..163: note = MG14-92 HNH domain

SEQ ID NO: 4402 - protein, 163 aa, unidentified; identical to SEQ ID NO: 4352
  REGION 1..163: note = Description of Unknown: uncultivated organism with predicted taxonomy: Collinsella
  REGION 1..163: note = MG14-93 HNH domain

SEQ ID NO: 4403 - protein, 163 aa, unidentified; identical to SEQ ID NO: 4347
  REGION 1..163: note = Description of Unknown: uncultivated organism with predicted taxonomy: Collinsella
  REGION 1..163: note = MG14-94 HNH domain

SEQ ID NO: 4404 - protein, 172 aa, unidentified
  REGION 1..172: note = Description of Unknown: uncultivated organism with predicted taxonomy: Collinsella
  REGION 1..172: note = MG14-95 HNH domain
DLKRSKHEREIVAESNRARLELNEQAKRDIIEFLGLPDDHHVRGRDLALVKLYREQGGKDPYTGAGIDFRRMLEEHGYAEIDHILPVSRTCDDSQANKALCLTKSNRDKSNRSPYEWMTSGEASAPDWGEFCGRMERWAKMCETRRYARKKLANLTCENLAERAGNFIDRNL

SEQ ID NO: 4405 - protein, 163 aa, unidentified; identical to SEQ ID NO: 4347
  REGION 1..163: note = Description of Unknown: uncultivated organism with predicted taxonomy: Collinsella
  REGION 1..163: note = MG14-96 HNH domain

SEQ ID NO: 4406 - protein, 163 aa, unidentified; identical to SEQ ID NO: 4347
  REGION 1..163: note = Description of Unknown: uncultivated organism with predicted taxonomy: Collinsella
  REGION 1..163: note = MG14-97 HNH domain

SEQ ID NO: 4407 - protein, 163 aa, unidentified
  REGION 1..163: note = Description of Unknown: uncultivated organism with predicted taxonomy: Collinsella
  REGION 1..163: note = MG14-98 HNH domain
ELRLPQRAKDEIAKANKKNEKNRERIAGQIAELRGCTADEVTGKQIEKYRLWEEQECFDLYTGAKIEVDRLISDDTYTQIDHILPFSRTGENSRNNKVLVLAKSNQDKREQTPYEWMSHDDAPSWDAFERRVQENQKLSRRKKNFLLEKDLDTKEGEFLARSF

SEQ ID NO: 4408 - protein, 165 aa, unidentified; identical to SEQ ID NO: 4320
  REGION 1..165: note = Description of Unknown: uncultivated organism with predicted taxonomy: Olsenella
  REGION 1..165: note = MG14-99 HNH domain

SEQ ID NO: 4409 - protein, 163 aa, unidentified; identical to SEQ ID NO: 4347
  REGION 1..163: note = Description of Unknown: uncultivated organism with predicted taxonomy: Collinsella
  REGION 1..163: note = MG14-100 HNH domain

SEQ ID NO: 4410 - protein, 172 aa, unidentified; identical to SEQ ID NO: 4358
  REGION 1..172: note = Description of Unknown: uncultivated organism with predicted taxonomy: Eggerthella sp. AM16-19
  REGION 1..172: note = MG14-101 HNH domain

SEQ ID NO: 4411 - protein, 165 aa, unidentified; identical to SEQ ID NO: 4365
  REGION 1..165: note = Description of Unknown: uncultivated organism with predicted taxonomy: Olsenella sp. KH3B4
  REGION 1..165: note = MG14-102 HNH domain

SEQ ID NO: 4412 - protein, 163 aa, unidentified
  REGION 1..163: note = Description of Unknown: uncultivated organism with predicted taxonomy: Collinsella
  REGION 1..163: note = MG14-103 HNH domain
ELRLPQRAKDEIAKANKKNEKNRERIAGQIAELRGCTADEVTGKQIEKYRLWEEQEYFDLYTGAKIEVDRLISDDTYTQIDHILPFSRTGENSRNNKVLVLAKSNQDKREQTPYEWMSHDGAPSWDAFERRVQENQKLSRRKKNFLLEKDLDAKEGDFLARSF

SEQ ID NO: 4413 - protein, 163 aa, unidentified
  REGION 1..163: note = Description of Unknown: uncultivated organism with predicted taxonomy: Collinsella
  REGION 1..163: note = MG14-104 HNH domain
ELRLPQRAKDEIAKANKKNEKNRERIAGQIAELRGCTADEVTGKQIEKYRLWEEQECFDLYTGAKIEVDRLISDDTYTQIDHILPFSRTGENSRNNKVLVLAKSNQDKREQTPYEWMSHDGAPSWDTFERRVQENQKLSRRKKNFLLEKDLDAKEGDFLARSF

SEQ ID NO: 4414 - protein, 163 aa, unidentified; identical to SEQ ID NO: 4330
  REGION 1..163: note = Description of Unknown: uncultivated organism with predicted taxonomy: Collinsella
  REGION 1..163: note = MG14-105 HNH domain

SEQ ID NO: 4415 - protein, 163 aa, unidentified; identical to SEQ ID NO: 4363
  REGION 1..163: note = Description of Unknown: uncultivated organism with predicted taxonomy: Collinsella
  REGION 1..163: note = MG14-106 HNH domain

SEQ ID NO: 4416 - protein, 163 aa, unidentified; identical to SEQ ID NO: 4313
  REGION 1..163: note = Description of Unknown: uncultivated organism with predicted taxonomy: Collinsella
  REGION 1..163: note = MG14-107 HNH domain

SEQ ID NO: 4417 - protein, 171 aa, unidentified
  REGION 1..171: note = Description of Unknown: uncultivated organism with predicted taxonomy: Atopobium sp. ICM42b
  REGION 1..171: note = MG14-108 HNH domain
DIAKSAKEKSKIAKGQNENRKENERIKDKIAKLLHIDQSEVTGKQITKMKLYEEQGGKDIYTGESLGDIAFAGGRRFLIDDNYCEIDHVLPYSRSADDLKSNKVLVLAKSNQEKGNRTPYEWMNSNDGNHPNWEQFCLRVTSNVRLSDSKKSKLLEENFAEKETSFIKRNM

SEQ ID NO: 4418 - protein, 171 aa, unidentified
  REGION 1..171: note = Description of Unknown: uncultivated organism with predicted taxonomy: Atopobium sp. ICM42b
  REGION 1..171: note = MG14-109 HNH domain
ELTKSPKQREKIAKEQNKNRKENERIRKEIAKYLEIDSSCVTKKQILKKKLYEEQKGLDVYTGESLEPSLHADDLTYLKDDSYCQIDHILPYSRSADDSIANKVLVLAKSNQDKGNRTPYEWMTSGHEHHLSWEEFAIRVSTNLSISDSKKWRLLEEDFNKKEVQFMNRNL

SEQ ID NO: 4419 - protein, 163 aa, unidentified; identical to SEQ ID NO: 4352
  REGION 1..163: note = Description of Unknown: uncultivated organism with predicted taxonomy: Collinsella
  REGION 1..163: note = MG14-110 HNH domain

SEQ ID NO: 4420 - protein, 172 aa, unidentified
  REGION 1..172: note = Description of Unknown: uncultivated organism
  REGION 1..172: note = MG14-111 HNH domain
DLKRSKHEKAIIAATNKANKDSNEQAKKDLVAFYGLPNDAHVSSADFEKMWLYREQFGQDPYTGKGINLERMLNDRDYVEIDHILPFSRSCDDSKSNKVLCLTKSNRDKANRTPYEWMTSGEPSAPDFGDFCRRMDAWAGKGKSAHYTKSKLSKLKNSTFGEEEQKFIDRNL

SEQ ID NO: 4421 - protein, 163 aa, unidentified
  REGION 1..163: note = Description of Unknown: uncultivated organism with predicted taxonomy: Collinsella
  REGION 1..163: note = MG14-112 HNH domain
ELRLPQRAKDEIAKANKKNEKNRERIAGQIAELRGCTADEVTGKQIEKYRLWEEQECFDLYTGAKIEVDRLISDDTYTQIDHILPFSRTGENSRNNKVLVLAKSNQDKREQTPYEWMSHDGAPSWDAFVRRVQENQKLSRRKKNFLLEKDLDTKEGEFLARSF

SEQ ID NO: 4422 - protein, 163 aa, unidentified; identical to SEQ ID NO: 4347
  REGION 1..163: note = Description of Unknown: uncultivated organism with predicted taxonomy: Collinsella
  REGION 1..163: note = MG14-113 HNH domain

SEQ ID NO: 4423 - protein, 163 aa, unidentified; identical to SEQ ID NO: 4347
  REGION 1..163: note = Description of Unknown: uncultivated organism with predicted taxonomy: Collinsella
  REGION 1..163: note = MG14-114 HNH domain

SEQ ID NO: 4424 - protein, 163 aa, unidentified; identical to SEQ ID NO: 4347
  REGION 1..163: note = Description of Unknown: uncultivated organism with predicted taxonomy: Collinsella
  REGION 1..163: note = MG14-115 HNH domain

SEQ ID NO: 4425 - protein, 163 aa, unidentified
  REGION 1..163: note = Description of Unknown: uncultivated organism with predicted taxonomy: Collinsella
  REGION 1..163: note = MG14-116 HNH domain
ELRLPQRAKDEIAKANKKNEKNRERIAGQIAELRGCAADEVTGKQIEKYRLWEEQEYFDLYTGAKIEVDRLISDDTYTQIDHILPFSRTGENSRNNKVLVLAKSNQDKREQTPYEWMSHDGAPSWDAFERRVQENQKLSRRKKNFLLEKDLDTKEGEFLARSF

SEQ ID NO: 4426 - protein, 163 aa, unidentified; identical to SEQ ID NO: 4347
  REGION 1..163: note = Description of Unknown: uncultivated organism with predicted taxonomy: Collinsella
  REGION 1..163: note = MG14-117 HNH domain

SEQ ID NO: 4427 - protein, 165 aa, unidentified
  REGION 1..165: note = Description of Unknown: uncultivated organism with predicted taxonomy: Olsenella sp. KCTC 15699
  REGION 1..165: note = MG14-118 HNH domain
DLKMSNKEKSLVDKRNRENAASNKKWATTAAGILGCTPEEVPGRIIRKLILREEQGEKDLYTGDSIDLEHLVRDDRYCEIDHILPYSRTCDDSRANKVLVLSKSNQDKRERTPYEWMTSGETSAPSWDSYRARVMAQVKNPRKRANYLNTDLGPETQAKFLARNL

SEQ ID NO: 4428 - protein, 163 aa, unidentified; identical to SEQ ID NO: 4347
  REGION 1..163: note = Description of Unknown: uncultivated organism with predicted taxonomy: Collinsella
  REGION 1..163: note = MG14-119 HNH domain

SEQ ID NO: 4429 - protein, 165 aa, unidentified; identical to SEQ ID NO: 4381
  REGION 1..165: note = Description of Unknown: uncultivated organism with predicted taxonomy: Collinsella tanakaei
  REGION 1..165: note = MG14-120 HNH domain

SEQ ID NO: 4430 - protein, 163 aa, unidentified
  REGION 1..163: note = Description of Unknown: uncultivated organism with predicted taxonomy: Collinsella
  REGION 1..163: note = MG14-121 HNH domain
ELRLPQRAKDEIAKANKKNKKNRERIAGQIAELRGCTIDEVTGKQIEKYRLWEEQECFDLYTGAKIEVDRLISDDTYTQIDHILPFSRTGENSRNNKVLVLAKSNQDKREQTPYEWMSHDGAPSWGAFERRVQENQKLSRRKKNFLLEKDLDTKEGEFLARSF

SEQ ID NO: 4431 - protein, 165 aa, unidentified
  REGION 1..165: note = Description of Unknown: uncultivated organism with predicted taxonomy: Olsenella
  REGION 1..165: note = MG14-122 HNH domain
DLKMSNKEKSLVDKRNRENAASNKKWATTAAGILGCTPEEVPGRIIRKLILREEQGEKDLYTGDSIDLEHLVRDDRYCEIDHILPYSRTCDDSRANKVLVLSKSNQDKRERTPYEWMTSGEAGAPSWDSYRARVMAQVKNPRKRANHLNTDLGPETQAKFLARNL

SEQ ID NO: 4432 - protein, 163 aa, unidentified; identical to SEQ ID NO: 4347
  REGION 1..163: note = Description of Unknown: uncultivated organism with predicted taxonomy: Olsenella mediterranea
  REGION 1..163: note = MG14-123 HNH domain

SEQ ID NO: 4433 - protein, 163 aa, unidentified; identical to SEQ ID NO: 4347
  REGION 1..163: note = Description of Unknown: uncultivated organism with predicted taxonomy: Collinsella
  REGION 1..163: note = MG14-124 HNH domain

SEQ ID NO: 4434 - protein, 163 aa, unidentified
  REGION 1..163: note = Description of Unknown: uncultivated organism with predicted taxonomy: Collinsella
  REGION 1..163: note = MG14-125 HNH domain
ELRLPQRAKVEIAKANKKNEKNRERIAGQIAELRGCTADEVTGKQIEKYRLWEEQECFDLYTGAKIEVDRLISDDTYTQIDHILPFSRTGENSRNNKVLVLAKSNQDKREQTPYEWMSHDGAPSWDAFERRVQENQKLSRRKKNFLLEKDLDTKEGEFLARSF

SEQ ID NO: 4435 - protein, 165 aa, unidentified
  REGION 1..165: note = Description of Unknown: uncultivated organism with predicted taxonomy: Libanicoccus massiliensis
  REGION 1..165: note = MG14-126 HNH domain
ELKQSKREKDLATKRRNAREADNKRYAKLAADILGVEPEAVRGNIIRMLALREEQGCKDIYTGDRIDLERLVTDEHYCEIDHVLPYSRTCDDDQSNKTLTFASNNQNKRERTPYEWMTSDEEKAPNWEEYRNRVIAEVKNPRKRAKFLNTLLDEDTQEGFINRNL

SEQ ID NO: 4436 - protein, 163 aa, unidentified; identical to SEQ ID NO: 4347
  REGION 1..163: note = Description of Unknown: uncultivated organism with predicted taxonomy: Collinsella
  REGION 1..163: note = MG14-127 HNH domain

SEQ ID NO: 4437 - protein, 163 aa, unidentified; identical to SEQ ID NO: 4352
  REGION 1..163: note = Description of Unknown: uncultivated organism with predicted taxonomy: Collinsella
  REGION 1..163: note = MG14-128 HNH domain

SEQ ID NO: 4438 - protein, 163 aa, unidentified; identical to SEQ ID NO: 4434
  REGION 1..163: note = Description of Unknown: uncultivated organism with predicted taxonomy: Collinsella
  REGION 1..163: note = MG14-129 HNH domain

SEQ ID NO: 4439 - protein, 165 aa, unidentified; identical to SEQ ID NO: 4336
  REGION 1..165: note = Description of Unknown: uncultivated organism with predicted taxonomy: Olsenella sp. KH3B4
  REGION 1..165: note = MG14-130 HNH domain

SEQ ID NO: 4440 - protein, 163 aa, unidentified; identical to SEQ ID NO: 4352
  REGION 1..163: note = Description of Unknown: uncultivated organism with predicted taxonomy: Collinsella
  REGION 1..163: note = MG14-131 HNH domain

SEQ ID NO: 4441 - protein, 163 aa, unidentified
  REGION 1..163: note = Description of Unknown: uncultivated organism with predicted taxonomy: Collinsella
  REGION 1..163: note = MG14-132 HNH domain
ELRLPQRAKDEIAKANKKNEKNRERIAGQIAELRGCTADEVTGKQIEKYRLWEEQECFDLYTGAKIEVDRLINDDTYTQIDHILPFSRTGENSRNNKVLVLAKSNQDKREQTPYEWMSHDGAPSWDAFERRVQENQKLSRRKKNFLLEKDLDTKEGEFLARSF

SEQ ID NO: 4442 - protein, 163 aa, unidentified; identical to SEQ ID NO: 4347
  REGION 1..163: note = Description of Unknown: uncultivated organism with predicted taxonomy: Collinsella
  REGION 1..163: note = MG14-133 HNH domain

SEQ ID NO: 4443 - protein, 163 aa, unidentified; identical to SEQ ID NO: 4347
  REGION 1..163: note = Description of Unknown: uncultivated organism with predicted taxonomy: Collinsella
  REGION 1..163: note = MG14-135 HNH domain

SEQ ID NO: 4444 - protein, 163 aa, unidentified; identical to SEQ ID NO: 4421
  REGION 1..163: note = Description of Unknown: uncultivated organism with predicted taxonomy: Collinsella
  REGION 1..163: note = MG14-136 HNH domain

SEQ ID NO: 4445 - protein, 172 aa, unidentified
  REGION 1..172: note = Description of Unknown: uncultivated organism with predicted taxonomy: Clostridiales
  REGION 1..172: note = MG14-137 HNH domain
DLKRSKREKAIIAATNKANKDSNEQAKKDLVAFYGLPNDAHVSSADFEKMWLYREQFGQDPYTGKGINLERMLNDRDYVEIDHILPFSRSCDDSKSNKVLCLTKSNRDKANRTPYEWMTSGEPSAPDFGDFCRRMDAWAGKGKSAHYTKSKLSKLKNSTFGEEEQKFIDRNL

SEQ ID NO: 4446 - protein, 163 aa, unidentified; identical to SEQ ID NO: 4313
  REGION 1..163: note = Description of Unknown: uncultivated organism with predicted taxonomy: Collinsella
  REGION 1..163: note = MG14-138 HNH domain

SEQ ID NO: 4447 - protein, 163 aa, unidentified; identical to SEQ ID NO: 4352
  REGION 1..163: note = Description of Unknown: uncultivated organism with predicted taxonomy: Collinsella
  REGION 1..163: note = MG14-139 HNH domain

SEQ ID NO: 4448 - protein, 163 aa, unidentified; identical to SEQ ID NO: 4313
  REGION 1..163: note = Description of Unknown: uncultivated organism with predicted taxonomy: Collinsella
  REGION 1..163: note = MG14-140 HNH domain

SEQ ID NO: 4449 - protein, 165 aa, unidentified; identical to SEQ ID NO: 4365
  REGION 1..165: note = Description of Unknown: uncultivated organism with predicted taxonomy: Olsenella sp. KH3B4
  REGION 1..165: note = MG14-141 HNH domain

SEQ ID NO: 4450 - protein, 163 aa, unidentified; identical to SEQ ID NO: 4352
  REGION 1..163: note = Description of Unknown: uncultivated organism with predicted taxonomy: Collinsella
  REGION 1..163: note = MG14-142 HNH domain

SEQ ID NO: 4451 - protein, 163 aa, unidentified; identical to SEQ ID NO: 4347
  REGION 1..163: note = Description of Unknown: uncultivated organism with predicted taxonomy: Collinsella
  REGION 1..163: note = MG14-143 HNH domain

SEQ ID NO: 4452 - protein, 172 aa, unidentified; identical to SEQ ID NO: 4358
  REGION 1..172: note = Description of Unknown: uncultivated organism with predicted taxonomy: Collinsella
  REGION 1..172: note = MG14-144 HNH domain

SEQ ID NO: 4453 - protein, 165 aa, unidentified; identical to SEQ ID NO: 4325
  REGION 1..165: note = Description of Unknown: uncultivated organism with predicted taxonomy: Olsenella sp. KCTC 15699
  REGION 1..165: note = MG14-145 HNH domain

SEQ ID NO: 4454 - protein, 165 aa, unidentified
  REGION 1..165: note = Description of Unknown: uncultivated organism with predicted taxonomy: Olsenella
  REGION 1..165: note = MG14-146 HNH domain
DLKMSNKEKSLVDKRNRENAASNKKWATTAAGILGCTPEEVPGRIIRKLILREEQGEKDLYTGDSIDLEHLVRDDRYCEIDHILPYSCTCDDSRANKVLVLSKSNQDKRERTPYEWMTSGEAGAPSWDSYRARVMAQVKNPRKRANYLNTDLGPETQAKFLARNL

SEQ ID NO: 4455 - protein, 167 aa, unidentified; identical to SEQ ID NO: 4346
  REGION 1..167: note = Description of Unknown: uncultivated organism with predicted taxonomy: Olsenella sp. KH3B4
  REGION 1..167: note = MG14-147 HNH domain

SEQ ID NO: 4456 - protein, 163 aa, unidentified; identical to SEQ ID NO: 4347
  REGION 1..163: note = Description of Unknown: uncultivated organism with predicted taxonomy: Olsenella mediterranea
  REGION 1..163: note = MG14-148 HNH domain

SEQ ID NO: 4457 - protein, 163 aa, unidentified; identical to SEQ ID NO: 4352
  REGION 1..163: note = Description of Unknown: uncultivated organism with predicted taxonomy: Collinsella
  REGION 1..163: note = MG14-149 HNH domain

SEQ ID NO: 4458 - protein, 163 aa, unidentified; identical to SEQ ID NO: 4347
  REGION 1..163: note = Description of Unknown: uncultivated organism with predicted taxonomy: Collinsella
  REGION 1..163: note = MG14-150 HNH domain

SEQ ID NO: 4459 - protein, 163 aa, unidentified; identical to SEQ ID NO: 4352
  REGION 1..163: note = Description of Unknown: uncultivated organism with predicted taxonomy: Collinsella
  REGION 1..163: note = MG14-151 HNH domain

SEQ ID NO: 4460 - protein, 163 aa, unidentified; identical to SEQ ID NO: 4323
  REGION 1..163: note = Description of Unknown: uncultivated organism with predicted taxonomy: Collinsella
  REGION 1..163: note = MG14-152 HNH domain

SEQ ID NO: 4461 - protein, 163 aa, unidentified; identical to SEQ ID NO: 4330
  REGION 1..163: note = Description of Unknown: uncultivated organism with predicted taxonomy: Coriobacteriales
  REGION 1..163: note = MG14-153 HNH domain

SEQ ID NO: 4462 - protein, 165 aa, unidentified; identical to SEQ ID NO: 4368
  REGION 1..165: note = Description of Unknown: uncultivated organism with predicted taxonomy: Olsenella
  REGION 1..165: note = MG14-154 HNH domain

SEQ ID NO: 4463 - protein, 165 aa, unidentified; identical to SEQ ID NO: 4345
  REGION 1..165: note = Description of Unknown: uncultivated organism with predicted taxonomy: Olsenella
  REGION 1..165: note = MG14-155 HNH domain

SEQ ID NO: 4464 - protein, 165 aa, unidentified; identical to SEQ ID NO: 4435
  REGION 1..165: note = Description of Unknown: uncultivated organism with predicted taxonomy: Libanicoccus massiliensis
  REGION 1..165: note = MG14-156 HNH domain

SEQ ID NO: 4465 - protein, 163 aa, unidentified; identical to SEQ ID NO: 4347
  REGION 1..163: note = Description of Unknown: uncultivated organism with predicted taxonomy: Collinsella
  REGION 1..163: note = MG14-157 HNH domain

SEQ ID NO: 4466 - protein, 163 aa, unidentified; identical to SEQ ID NO: 4323
  REGION 1..163: note = Description of Unknown: uncultivated organism with predicted taxonomy: Collinsella
  REGION 1..163: note = MG14-158 HNH domain

SEQ ID NO: 4467 - protein, 163 aa, unidentified; identical to SEQ ID NO: 4347
  REGION 1..163: note = Description of Unknown: uncultivated organism with predicted taxonomy: Collinsella
  REGION 1..163: note = MG14-159 HNH domain

SEQ ID NO: 4468 - protein, 163 aa, unidentified; identical to SEQ ID NO: 4367
  REGION 1..163: note = Description of Unknown: uncultivated organism with predicted taxonomy: Collinsella
  REGION 1..163: note = MG14-160 HNH domain

SEQ ID NO: 4469 - protein, 163 aa, unidentified; identical to SEQ ID NO: 4367
  REGION 1..163: note = Description of Unknown: uncultivated organism with predicted taxonomy: Collinsella
  REGION 1..163: note = MG14-161 HNH domain

SEQ ID NO: 4470 - protein, 165 aa, unidentified; identical to SEQ ID NO: 4336
  REGION 1..165: note = Description of Unknown: uncultivated organism with predicted taxonomy: Olsenella
  REGION 1..165: note = MG14-162 HNH domain

SEQ ID NO: 4471 - protein, 163 aa, unidentified; identical to SEQ ID NO: 4367
  REGION 1..163: note = Description of Unknown: uncultivated organism with predicted taxonomy: Collinsella
  REGION 1..163: note = MG14-163 HNH domain

SEQ ID NO: 4472 - protein, 165 aa, unidentified; identical to SEQ ID NO: 4319
  REGION 1..165: note = Description of Unknown: uncultivated organism with predicted taxonomy: Olsenella
  REGION 1..165: note = MG14-164 HNH domain

SEQ ID NO: 4473 - protein, 163 aa, unidentified; identical to SEQ ID NO: 4323
  REGION 1..163: note = Description of Unknown: uncultivated organism with predicted taxonomy: Collinsella
  REGION 1..163: note = MG14-165 HNH domain

SEQ ID NO: 4474 - protein, 163 aa, unidentified; identical to SEQ ID NO: 4347
  REGION 1..163: note = Description of Unknown: uncultivated organism with predicted taxonomy: Collinsella sp. AM17-1
  REGION 1..163: note = MG14-166 HNH domain

SEQ ID NO: 4475 - protein, 163 aa, unidentified; identical to SEQ ID NO: 4352
  REGION 1..163: note = Description of Unknown: uncultivated organism with predicted taxonomy: Collinsella
  REGION 1..163: note = MG14-167 HNH domain

SEQ ID NO: 4476 - protein, 165 aa, unidentified; identical to SEQ ID NO: 4329
  REGION 1..165: note = Description of Unknown: uncultivated organism with predicted taxonomy: Olsenella sp. KH3B4
  REGION 1..165: note = MG14-168 HNH domain

SEQ ID NO: 4477 - protein, 165 aa, unidentified; identical to SEQ ID NO: 4325
  REGION 1..165: note = Description of Unknown: uncultivated organism with predicted taxonomy: Olsenella
  REGION 1..165: note = MG14-169 HNH domain

SEQ ID NO: 4478 - protein, 165 aa, unidentified; identical to SEQ ID NO: 4343
  REGION 1..165: note = Description of Unknown: uncultivated organism with predicted taxonomy: Olsenella sp. KH3B4
  REGION 1..165: note = MG14-170 HNH domain

SEQ ID NO: 4479 - protein, 161 aa, unidentified; identical to SEQ ID NO: 4342
  REGION 1..161: note = Description of Unknown: uncultivated organism with predicted taxonomy: Coriobacteriia bacterium
  REGION 1..161: note = MG14-171 HNH domain

SEQ ID NO: 4480 - protein, 163 aa, unidentified; identical to SEQ ID NO: 4375
  REGION 1..163: note = Description of Unknown: uncultivated organism with predicted taxonomy: Collinsella
  REGION 1..163: note = MG14-172 HNH domain

SEQ ID NO: 4481 - protein, 163 aa, unidentified; identical to SEQ ID NO: 4384
  REGION 1..163: note = Description of Unknown: uncultivated organism with predicted taxonomy: Collinsella
  REGION 1..163: note = MG14-173 HNH domain

SEQ ID NO: 4482 - protein, 163 aa, unidentified
  REGION 1..163: note = Description of Unknown: uncultivated organism with predicted taxonomy: Collinsella
  REGION 1..163: note = MG14-174 HNH domain
ELRLPQRAKDEIAKANKKNEKNRERIARQIAELRGCTADEVTGKQIEKYRLWEEQECFDLYTGAKIEVDRLISDDTYTQIDHILPFSRTGENSRNNKVLVLAKSNQDKREQTPYEWMSHDGAPSWDAFERRVQENQKLSRRKKNFLLEKDLDTKEGEFLARSF

SEQ ID NO: 4483 - protein, 163 aa, unidentified; identical to SEQ ID NO: 4349
  REGION 1..163: note = Description of Unknown: uncultivated organism with predicted taxonomy: Collinsella
  REGION 1..163: note = MG14-175 HNH domain

SEQ ID NO: 4484 - protein, 163 aa, unidentified; identical to SEQ ID NO: 4349
  REGION 1..163: note = Description of Unknown: uncultivated organism with predicted taxonomy: Collinsella aerofaciens
  REGION 1..163: note = MG14-176 HNH domain

SEQ ID NO: 4485 - protein, 163 aa, unidentified; identical to SEQ ID NO: 4347
  REGION 1..163: note = Description of Unknown: uncultivated organism with predicted taxonomy: Collinsella
  REGION 1..163: note = MG14-177 HNH domain

SEQ ID NO: 4486 - protein, 165 aa, unidentified
  REGION 1..165: note = Description of Unknown: uncultivated organism with predicted taxonomy: Olsenella sp. GAM18
  REGION 1..165: note = MG14-178 HNH domain
DLKMSNKEKILVDKRNRENAASNKKWATTAAGILGCTPEEVPGRIIRKLILREEQGEKDLYTGDSIDLEHLVRDDRYCEIDHILPYSRTCDDSRANKVLVLSKSNQDKRERTPYEWMTSGEAGAPSWDSYRARVIAQVKNPRKRANYLNTDLGPETQAKFLARNL

SEQ ID NO: 4487 - protein, 163 aa, unidentified; identical to SEQ ID NO: 4353
  REGION 1..163: note = Description of Unknown: uncultivated organism with predicted taxonomy: Collinsella
  REGION 1..163: note = MG14-179 HNH domain

SEQ ID NO: 4488 - protein, 163 aa, unidentified; identical to SEQ ID NO: 4347
  REGION 1..163: note = Description of Unknown: uncultivated organism with predicted taxonomy: Collinsella
  REGION 1..163: note = MG14-180 HNH domain

SEQ ID NO: 4489 - protein, 167 aa, unidentified; identical to SEQ ID NO: 4380
  REGION 1..167: note = Description of Unknown: uncultivated organism with predicted taxonomy: Olsenella
  REGION 1..167: note = MG14-181 HNH domain

SEQ ID NO: 4490 - protein, 163 aa, unidentified; identical to SEQ ID NO: 4347
  REGION 1..163: note = Description of Unknown: uncultivated organism with predicted taxonomy: Olsenella mediterranea
  REGION 1..163: note = MG14-182 HNH domain

SEQ ID NO: 4491 - protein, 163 aa, unidentified; identical to SEQ ID NO: 4347
  REGION 1..163: note = Description of Unknown: uncultivated organism with predicted taxonomy: Collinsella
  REGION 1..163: note = MG14-183 HNH domain

SEQ ID NO: 4492 - protein, 165 aa, unidentified; identical to SEQ ID NO: 4431
  REGION 1..165: note = Description of Unknown: uncultivated organism with predicted taxonomy: Olsenella
  REGION 1..165: note = MG14-184 HNH domain

SEQ ID NO: 4493 - protein, 163 aa, unidentified; identical to SEQ ID NO: 4347
  REGION 1..163: note = Description of Unknown: uncultivated organism with predicted taxonomy: Collinsella
  REGION 1..163: note = MG14-185 HNH domain

SEQ ID NO: 4494 - protein, 163 aa, unidentified; identical to SEQ ID NO: 4347
  REGION 1..163: note = Description of Unknown: uncultivated organism with predicted taxonomy: Collinsella
  REGION 1..163: note = MG14-186 HNH domain

SEQ ID NO: 4495 - protein, 163 aa, unidentified; identical to SEQ ID NO: 4399
  REGION 1..163: note = Description of Unknown: uncultivated organism with predicted taxonomy: Coriobacteriales
  REGION 1..163: note = MG14-187 HNH domain

SEQ ID NO: 4496 - protein, 163 aa, unidentified; identical to SEQ ID NO: 4441
  REGION 1..163: note = Description of Unknown: uncultivated organism with predicted taxonomy: Collinsella
  REGION 1..163: note = MG14-188 HNH domain

SEQ ID NO: 4497 - protein, 163 aa, unidentified; identical to SEQ ID NO: 4352
  REGION 1..163: note = Description of Unknown: uncultivated organism with predicted taxonomy: Collinsella
  REGION 1..163: note = MG14-189 HNH domain

SEQ ID NO: 4498 - protein, 163 aa, unidentified; identical to SEQ ID NO: 4347
  REGION 1..163: note = Description of Unknown: uncultivated organism with predicted taxonomy: Collinsella
  REGION 1..163: note = MG14-190 HNH domain

SEQ ID NO: 4499 - protein, 163 aa, unidentified; identical to SEQ ID NO: 4352
  REGION 1..163: note = Description of Unknown: uncultivated organism with predicted taxonomy: Collinsella
  REGION 1..163: note = MG14-191 HNH domain

SEQ ID NO: 4500 - protein, 163 aa, unidentified; identical to SEQ ID NO: 4347
  REGION 1..163: note = Description of Unknown: uncultivated organism with predicted taxonomy: Collinsella
  REGION 1..163: note = MG14-192 HNH domain

SEQ ID NO: 4501 - protein, 163 aa, unidentified; identical to SEQ ID NO: 4412
  REGION 1..163: note = Description of Unknown: uncultivated organism with predicted taxonomy: Collinsella
  REGION 1..163: note = MG14-193 HNH domain

SEQ ID NO: 4502 - protein, 165 aa, unidentified; identical to SEQ ID NO: 4364
  REGION 1..165: note = Description of Unknown: uncultivated organism with predicted taxonomy: Olsenella
  REGION 1..165: note = MG14-194 HNH domain

SEQ ID NO: 4503 - protein, 163 aa, unidentified; identical to SEQ ID NO: 4349
  REGION 1..163: note = Description of Unknown: uncultivated organism with predicted taxonomy: Collinsella
  REGION 1..163: note = MG14-195 HNH domain

SEQ ID NO: 4504 - protein, 172 aa, unidentified; identical to SEQ ID NO: 4374
  REGION 1..172: note = Description of Unknown: uncultivated organism with predicted taxonomy: Collinsella
  REGION 1..172: note = MG14-196 HNH domain

SEQ ID NO: 4505 - protein, 163 aa, unidentified; identical to SEQ ID NO: 4347
  REGION 1..163: note = Description of Unknown: uncultivated organism with predicted taxonomy: Collinsella
  REGION 1..163: note = MG14-197 HNH domain

SEQ ID NO: 4506 - protein, 163 aa, unidentified; identical to SEQ ID NO: 4347
  REGION 1..163: note = Description of Unknown: uncultivated organism with predicted taxonomy: Collinsella
  REGION 1..163: note = MG14-198 HNH domain

SEQ ID NO: 4507 - protein, 163 aa, unidentified; identical to SEQ ID NO: 4347
  REGION 1..163: note = Description of Unknown: uncultivated organism with predicted taxonomy: Collinsella
  REGION 1..163: note = MG14-199 HNH domain

SEQ ID NO: 4508 - protein, 163 aa, unidentified; identical to SEQ ID NO: 4352
  REGION 1..163: note = Description of Unknown: uncultivated organism with predicted taxonomy: Collinsella
  REGION 1..163: note = MG14-200 HNH domain

SEQ ID NO: 4509 - protein, 163 aa, unidentified; identical to SEQ ID NO: 4313
  REGION 1..163: note = Description of Unknown: uncultivated organism with predicted taxonomy: Collinsella
  REGION 1..163: note = MG14-201 HNH domain

SEQ ID NO: 4510 - protein, 163 aa, unidentified; identical to SEQ ID NO: 4434
  REGION 1..163: note = Description of Unknown: uncultivated organism with predicted taxonomy: Collinsella
  REGION 1..163: note = MG14-202 HNH domain

SEQ ID NO: 4511 - protein, 163 aa, unidentified; identical to SEQ ID NO: 4434
  REGION 1..163: note = Description of Unknown: uncultivated organism with predicted taxonomy: Collinsella
  REGION 1..163: note = MG14-203 HNH domain

SEQ ID NO: 4512 - protein, 163 aa, unidentified; identical to SEQ ID NO: 4352
  REGION 1..163: note = Description of Unknown: uncultivated organism with predicted taxonomy: Collinsella
  REGION 1..163: note = MG14-204 HNH domain

SEQ ID NO: 4513 - protein, 163 aa, unidentified
  REGION 1..163: note = Description of Unknown: uncultivated organism with predicted taxonomy: Olsenella mediterranea
  REGION 1..163: note = MG14-205 HNH domain
ELRLPQRAKDEIAKANKKNEKNRERIAGQIAELRGCTADEVTGKQIEKYRLWEEQECFDLYTGAKIEVDRLISDDTYTQIDHILPFSRTGENSRNNKVLVLAKSNQDKREQTPYEWMSHDGAPSWDTFERRVQENQKLSRRKKNFLLEKDLDTKEGEFLARSF

SEQ ID NO: 4514 - protein, 163 aa, unidentified; identical to SEQ ID NO: 4347
  REGION 1..163: note = Description of Unknown: uncultivated organism with predicted taxonomy: Collinsella
  REGION 1..163: note = MG14-206 HNH domain

SEQ ID NO: 4515 - protein, 163 aa, unidentified; identical to SEQ ID NO: 4421
  REGION 1..163: note = Description of Unknown: uncultivated organism with predicted taxonomy: Collinsella
  REGION 1..163: note = MG14-207 HNH domain

SEQ ID NO: 4516 - protein, 165 aa, unidentified; identical to SEQ ID NO: 4365
  REGION 1..165: note = Description of Unknown: uncultivated organism with predicted taxonomy: Olsenella
  REGION 1..165: note = MG14-208 HNH domain

SEQ ID NO: 4517 - protein, 163 aa, unidentified; identical to SEQ ID NO: 4352
  REGION 1..163: note = Description of Unknown: uncultivated organism with predicted taxonomy: Collinsella
  REGION 1..163: note = MG14-209 HNH domain

SEQ ID NO: 4518 - protein, 163 aa, unidentified; identical to SEQ ID NO: 4389
  REGION 1..163: note = Description of Unknown: uncultivated organism with predicted taxonomy: Collinsella
  REGION 1..163: note = MG14-210 HNH domain

SEQ ID NO: 4519 - protein, 163 aa, unidentified; identical to SEQ ID NO: 4347
  REGION 1..163: note = Description of Unknown: uncultivated organism with predicted taxonomy: Collinsella
  REGION 1..163: note = MG14-211 HNH domain

SEQ ID NO: 4520 - protein, 172 aa, unidentified; identical to SEQ ID NO: 4404
  REGION 1..172: note = Description of Unknown: uncultivated organism with predicted taxonomy: Collinsella
  REGION 1..172: note = MG14-212 HNH domain

SEQ ID NO: 4521 - protein, 163 aa, unidentified; identical to SEQ ID NO: 4347
  REGION 1..163: note = Description of Unknown: uncultivated organism with predicted taxonomy: Collinsella
  REGION 1..163: note = MG14-213 HNH domain

SEQ ID NO: 4522 - protein, 163 aa, unidentified; identical to SEQ ID NO: 4347
  REGION 1..163: note = Description of Unknown: uncultivated organism with predicted taxonomy: Coriobacteriales
  REGION 1..163: note = MG14-214 HNH domain

SEQ ID NO: 4523 - protein, 167 aa, unidentified
  REGION 1..167: note = Description of Unknown: uncultivated organism with predicted taxonomy: Olsenella
  REGION 1..167: note = MG14-215 HNH domain
ELKQSKREKDAISKFQRKKEQANNRYREVAAGILNISPDEVSDRIIEKMAFREQQNDKDAYTGTTINLERLVTDSHYCQVDHVLPYSRTSDNSRNNRVLVLSTTNQNKRERTPFEWMNSGEANAPAWNDYKKHVLANKNYSQRKKQVYLLNENLDSETEAQFISRNL

SEQ ID NO: 4524 - protein, 163 aa, unidentified; identical to SEQ ID NO: 4347
  REGION 1..163: note = Description of Unknown: uncultivated organism with predicted taxonomy: Collinsella
  REGION 1..163: note = MG14-216 HNH domain

SEQ ID NO: 4525 - protein, 163 aa, unidentified; identical to SEQ ID NO: 4372
  REGION 1..163: note = Description of Unknown: uncultivated organism with predicted taxonomy: Collinsella
  REGION 1..163: note = MG14-217 HNH domain

SEQ ID NO: 4526 - protein, 163 aa, unidentified; identical to SEQ ID NO: 4347
  REGION 1..163: note = Description of Unknown: uncultivated organism with predicted taxonomy: Olsenella mediterranea
  REGION 1..163: note = MG14-218 HNH domain

SEQ ID NO: 4527 - protein, 163 aa, unidentified; identical to SEQ ID NO: 4352
  REGION 1..163: note = Description of Unknown: uncultivated organism with predicted taxonomy: Collinsella
  REGION 1..163: note = MG14-219 HNH domain

SEQ ID NO: 4528 - protein, 163 aa, unidentified; identical to SEQ ID NO: 4352
  REGION 1..163: note = Description of Unknown: uncultivated organism with predicted taxonomy: Collinsella
  REGION 1..163: note = MG14-220 HNH domain

SEQ ID NO: 4529 - protein, 163 aa, unidentified; identical to SEQ ID NO: 4347
  REGION 1..163: note = Description of Unknown: uncultivated organism with predicted taxonomy: Collinsella
  REGION 1..163: note = MG14-221 HNH domain

SEQ ID NO: 4530 - protein, 163 aa, unidentified; identical to SEQ ID NO: 4413
  REGION 1..163: note = Description of Unknown: uncultivated organism with predicted taxonomy: Collinsella
  REGION 1..163: note = MG14-222 HNH domain

SEQ ID NO: 4531 - protein, 172 aa, unidentified
  REGION 1..172: note = Description of Unknown: uncultivated organism with predicted taxonomy: Collinsella sp. AM13-34
  REGION 1..172: note = MG14-223 HNH domain
DLKRSKHEREIVAESNRARLELNEQAKRDIIEFLGLPDDHHVRGRDLALVKLYREQGGKDPYTGAAIDFRRMLEEHRYAEIDHILPVSRTCDDSQANKVLCLTKSNRDKSNRSPYEWMTSGEASAPDWGEFCGRMERWAKMCEPRRYARKKLANLTCENLAERAGNFIDRNL

SEQ ID NO: 4532 - protein, 163 aa, unidentified; identical to SEQ ID NO: 4347
  REGION 1..163: note = Description of Unknown: uncultivated organism with predicted taxonomy: Collinsella
  REGION 1..163: note = MG14-224 HNH domain

SEQ ID NO: 4533 - protein, 163 aa, unidentified; identical to SEQ ID NO: 4313
  REGION 1..163: note = Description of Unknown: uncultivated organism with predicted taxonomy: Collinsella
  REGION 1..163: note = MG14-225 HNH domain

SEQ ID NO: 4534 - protein, 163 aa, unidentified; identical to SEQ ID NO: 4313
  REGION 1..163: note = Description of Unknown: uncultivated organism with predicted taxonomy: Collinsella
  REGION 1..163: note = MG14-226 HNH domain

SEQ ID NO: 4535 - protein, 163 aa, unidentified; identical to SEQ ID NO: 4362
  REGION 1..163: note = Description of Unknown: uncultivated organism with predicted taxonomy: Collinsella
  REGION 1..163: note = MG14-227 HNH domain

SEQ ID NO: 4536 - protein, 165 aa, unidentified; identical to SEQ ID NO: 4381
  REGION 1..165: note = Description of Unknown: uncultivated organism with predicted taxonomy: Olsenella
  REGION 1..165: note = MG14-228 HNH domain

SEQ ID NO: 4537 - protein, 163 aa, unidentified; identical to SEQ ID NO: 4347
  REGION 1..163: note = Description of Unknown: uncultivated organism with predicted taxonomy: Olsenella
  REGION 1..163: note = MG14-229 HNH domain

SEQ ID NO: 4538 - protein, 163 aa, unidentified; identical to SEQ ID NO: 4347
  REGION 1..163: note = Description of Unknown: uncultivated organism with predicted taxonomy: Collinsella
  REGION 1..163: note = MG14-230 HNH domain

SEQ ID NO: 4539 - protein, 163 aa, unidentified; identical to SEQ ID NO: 4421
  REGION 1..163: note = Description of Unknown: uncultivated organism with predicted taxonomy: Collinsella
  REGION 1..163: note = MG14-231 HNH domain

SEQ ID NO: 4540 - protein, 163 aa, unidentified; identical to SEQ ID NO: 4352
  REGION 1..163: note = Description of Unknown: uncultivated organism with predicted taxonomy: Collinsella
  REGION 1..163: note = MG14-232 HNH domain

SEQ ID NO: 4541 - protein, 163 aa, unidentified; identical to SEQ ID NO: 4347
  REGION 1..163: note = Description of Unknown: uncultivated organism with predicted taxonomy: Collinsella
  REGION 1..163: note = MG14-233 HNH domain

SEQ ID NO: 4542 - protein, 163 aa, unidentified; identical to SEQ ID NO: 4352
  REGION 1..163: note = Description of Unknown: uncultivated organism with predicted taxonomy: Collinsella
  REGION 1..163: note = MG14-234 HNH domain

SEQ ID NO: 4543 - protein, 163 aa, unidentified; identical to SEQ ID NO: 4425
  REGION 1..163: note = Description of Unknown: uncultivated organism with predicted taxonomy: Collinsella
  REGION 1..163: note = MG14-235 HNH domain

SEQ ID NO: 4544 - protein, 163 aa, unidentified; identical to SEQ ID NO: 4347
  REGION 1..163: note = Description of Unknown: uncultivated organism with predicted taxonomy: Collinsella
  REGION 1..163: note = MG14-236 HNH domain

SEQ ID NO: 4545 - protein, 163 aa, unidentified; identical to SEQ ID NO: 4347
  REGION 1..163: note = Description of Unknown: uncultivated organism with predicted taxonomy: Collinsella
  REGION 1..163: note = MG14-237 HNH domain

SEQ ID NO: 4546 - protein, 171 aa, unidentified; identical to SEQ ID NO: 4417
  REGION 1..171: note = Description of Unknown: uncultivated organism with predicted taxonomy: Atopobium sp. ICM42b
  REGION 1..171: note = MG14-238 HNH domain

SEQ ID NO: 4547 - protein, 163 aa, unidentified; identical to SEQ ID NO: 4389
  REGION 1..163: note = Description of Unknown: uncultivated organism with predicted taxonomy: Collinsella
  REGION 1..163: note = MG14-239 HNH domain

SEQ ID NO: 4548 - protein, 163 aa, unidentified; identical to SEQ ID NO: 4407
  REGION 1..163: note = Description of Unknown: uncultivated organism with predicted taxonomy: Collinsella
  REGION 1..163: note = MG14-240 HNH domain

SEQ ID NO: 4549 - protein, 163 aa, unidentified; identical to SEQ ID NO: 4430
  REGION 1..163: note = Description of Unknown: uncultivated organism with predicted taxonomy: Collinsella
  REGION 1..163: note = MG14-241 HNH domain

SEQ ID NO: 4550 - protein, 163 aa, unidentified; identical to SEQ ID NO: 4388
  REGION 1..163: note = Description of Unknown: uncultivated organism with predicted taxonomy: Collinsella
  REGION 1..163: note = MG14-242 HNH domain

SEQ ID NO: 4551 - protein, 163 aa, unidentified; identical to SEQ ID NO: 4352
  REGION 1..163: note = Description of Unknown: uncultivated organism with predicted taxonomy: Collinsella
  REGION 1..163: note = MG14-243 HNH domain

SEQ ID NO: 4552 - protein, 167 aa, unidentified
  REGION 1..167: note = Description of Unknown: uncultivated organism
  REGION 1..167: note = MG14-244 HNH domain
DLKMSKREKDAVAKRQRTNEAANKKRATLAAGILGCEPSEVSHLVIRKLALREEQSDKDIYTGAAIDLQRLVEDDHYCEIGHILPYSRTGMGGWNNEVLVLAASNQKKRERTPYEWMQQDAGKAGVPAWDEYSSRVTATIDNPRKRRNLLCKDTGDEAMNGFLLRDL

SEQ ID NO: 4553 - protein, 165 aa, unidentified
  REGION 1..165: note = Description of Unknown: uncultivated organism with predicted taxonomy: Olsenella
  REGION 1..165: note = MG14-245 HNH domain
DLKMSNKEKATVSKNQRANEAANKKWAAKAANILGCSPEEVPGRIVRKLAMREEQGDKDAYTGAAIDLEHLVRDDRYCEIDHILPYSRTCDDSRANKVLVLSKSNQDKRERTPYEWMTSGEPGAPDWDEYRNRVMATVKYARKRANLLNTDLGPNVQAQFLARNL

SEQ ID NO: 4554 - protein, 166 aa, unidentified
  REGION 1..166: note = Description of Unknown: uncultivated organism with predicted taxonomy: Coriobacteriales
  REGION 1..166: note = MG14-246 HNH domain
ELKQSSKEKKSIAKSNLQNKKDNERIAKTIAELLGCSPDDVRGKQIRRFALREEQGCKDAYTGDSIDLMRMLTEDRYTEIDHILPYSRTCDDSRANKVLVLQKSNQDKKERTPWEWMSDDASKGAPDWEEFKARTLTNHRLSYKKRDHLLNQNLNGQEQSFIDRNL

SEQ ID NO: 4555 - protein, 166 aa, unidentified; identical to SEQ ID NO: 4554
  REGION 1..166: note = Description of Unknown: uncultivated organism with predicted taxonomy: Coriobacteriales
  REGION 1..166: note = MG14-247 HNH domain

SEQ ID NO: 4556 - protein, 166 aa, unidentified; identical to SEQ ID NO: 4554
  REGION 1..166: note = Description of Unknown: uncultivated organism
  REGION 1..166: note = MG14-248 HNH domain

SEQ ID NO: 4557 - protein, 166 aa, unidentified; identical to SEQ ID NO: 4554
  REGION 1..166: note = Description of Unknown: uncultivated organism with predicted taxonomy: Olsenella
  REGION 1..166: note = MG14-249 HNH domain

SEQ ID NO: 4558 - protein, 167 aa, unidentified
  REGION 1..167: note = Description of Unknown: uncultivated organism with predicted taxonomy: Olsenella
  REGION 1..167: note = MG14-250 HNH domain
ELKMSAREKEMVSKRQRANETANKNWAAIAAKILCCEPEEVPGQTIRKLAFREEQGEKDIYTNAPIDLEKLVTDNRYCEIDHVLPYSRTCDDSRANKVLVLSASNQNKRERTPYEWMSQDAGKAGTPKWSEYSARVIATVKNPRKRANLLNMDLDKDAESEFLQRNL

SEQ ID NO: 4559 - protein, 167 aa, unidentified
  REGION 1..167: note = Description of Unknown: uncultivated organism
  REGION 1..167: note = MG14-251 HNH domain
NLKMSKREKDAIAKRQRSNEAANKKWAALAAGILDCEPSEVPHLVIRKLALREEQGDKDVYTGAAIDLERLVADDHYCEIDHILPYSRTGMSGWNNEVLVLAASNQKKRERTPYEWMQQDAGKSGVPAWDAYSSRVAATIGNPRKRRNLLCMDTGQEAMNGFLLRDL

SEQ ID NO: 4560 - protein, 167 aa, unidentified
  REGION 1..167: note = Description of Unknown: uncultivated organism with predicted taxonomy: Olsenella umbonata
  REGION 1..167: note = MG14-252 HNH domain
DLKRSKHEKDLISKRNRENERKNKQWRAQAAEIQGIDPDEVRPKLLKKMALWEEQGGLDAYTGHKIEFDRMISDDKYCEIDHVLPYSRTCDDSRSNKVLVLAKSNQDKRERTPYEWMTQDAQKGAPSWDEYQARVIANRHISPRKRRYLLNNNLGPDQESDFLNRNL

SEQ ID NO: 4561 - protein, 164 aa, unidentified
  REGION 1..164: note = Description of Unknown: uncultivated organism with predicted taxonomy: Atopobium sp. ICM42b
  REGION 1..164: note = MG14-253 HNH domain
DLKNSKAARDMIAKRQRDREKEKNALRKVIAELLSCELEDVTSNQLFRYELRQEQGDVDVYTGEQIDLMRMLLDQSYTQIDHILPYSRTAIDSRSNKVLVLSGSNAAKGERTPLEWMEEDVGAPDKDQYQSRIHSMSLPAAKKEKLLRRELTDADSRGFLDRNL

SEQ ID NO: 4562 - protein, 167 aa, unidentified; identical to SEQ ID NO: 4558
  REGION 1..167: note = Description of Unknown: uncultivated organism with predicted taxonomy: Olsenella sp. KH3B4
  REGION 1..167: note = MG14-254 HNH domain

SEQ ID NO: 4563 - protein, 167 aa, unidentified; identical to SEQ ID NO: 4560
  REGION 1..167: note = Description of Unknown: uncultivated organism with predicted taxonomy: Olsenella
  REGION 1..167: note = MG14-255 HNH domain

SEQ ID NO: 4564 - protein, 164 aa, unidentified
  REGION 1..164: note = Description of Unknown: uncultivated organism with predicted taxonomy: Olsenella
  REGION 1..164: note = MG14-256 HNH domain
DLKNSKAVKDKISNQQRRREAEKATLRRTIAELLQCEPDDVTGGQLLRYELRQEQNDQDVYTGDSIDLMRMLRDQSYTQIDHILPYSRTAIDSRSNKVLVLASSNAAKGERTPLEWMEQDANGPSIDAYQSRVHALNLPSAKKEKLLRRELTEDDAKHFLDRNL

SEQ ID NO: 4565 - protein, 160 aa, unidentified
  REGION 1..160: note = Description of Unknown: uncultivated organism with predicted taxonomy: Megasphaera
  REGION 1..160: note = MG15-1 HNH domain
ELARSFRDRKKMEKGMQENQAKNEKIRQRLISEFGVLRPKGMDIVKFKLCEEQNGECAYSQKHFDMEKLLKDPSYAEVDHIIPYSRSFDDSYNNKVLVLTKENREKRNRIPMEYLADAPERKNRFIHWVKSTIRNSRKRENLLRTDYTATTENEWKRRNL

SEQ ID NO: 4566 - protein, 159 aa, unidentified
  REGION 1..159: note = Description of Unknown: uncultivated organism with predicted taxonomy: Selenomonas sp. AE3005
  REGION 1..159: note = MG15-3 HNH domain
EMGRTFQARRDMMKSMEDNSAKNEKLKEELKGYGVMHPSGLDIVKLKLYKDQGGVCAYSLAAMPIEKVFKEHDYAEVDHILPYSRSFDDSYSNKVLVLTKENRDKGNRTPMEYMANMPGRKHDFITWVNSSIRDFRKRDNLLLENFDEEREDAWKERHL

SEQ ID NO: 4567 - protein, 159 aa, unidentified; identical to SEQ ID NO: 4566
  REGION 1..159: note = Description of Unknown: uncultivated organism with predicted taxonomy: Selenomonas sp. AE3005
  REGION 1..159: note = MG15-4 HNH domain

SEQ ID NO: 4568 - protein, 160 aa, unidentified
  REGION 1..160: note = Description of Unknown: uncultivated organism with predicted taxonomy: Veillonellales
  REGION 1..160: note = MG15-6 HNH domain
ELARSFKDRAAMDHRMKENYAKNEKIKERLSKEFHIMNPTGQDIVKWKLYEQQQGCCAYSQKPFDVDRLLHDGNYAEVDHILPYSRSFDDTYRNKVLVLEKENRDKGNRTPMEYLADKPERKEKFIAWVKTVIKDSKKREHLLRVKYGRDEEAEWKQRHL

SEQ ID NO: 4569 - protein, 160 aa, unidentified
  REGION 1..160: note = Description of Unknown: uncultivated organism with predicted taxonomy: Megasphaera stantonii
  REGION 1..160: note = MG15-7 HNH domain
ELAKNFRDRKKMEKGMQENQAKNEKIRQRLMSEFGVLRPKGMDIVKFKLCEEQNGECAYSQKHFDMEKLLRDPSYAEVDHIIPYSRSFDDSYNNKVLVLTKENREKRNRIPMEYLADATERKNRFIHWVKSTIRNSRKRENLLRTDYTATTENEWKRRNL

SEQ ID NO: 4570 - protein, 160 aa, unidentified
  REGION 1..160: note = Description of Unknown: uncultivated organism with predicted taxonomy: Dialister
  REGION 1..160: note = MG15-8 HNH domain
ELARSFKDRAAMDHRMKENYAKNEKIKERLSKEFHIMNPRGQDIVKWKLYEQQQGCCAYSQKPFDVDRLLHDGNYAEVDHILPYSRSFDDTYRNKVLVLEKENRDKGNRTPMEYLADKPERKERFIAWVKTTIKDSKKREHLLRVKYGRDEEAEWKQRHL

SEQ ID NO: 4571 - protein, 160 aa, unidentified
  REGION 1..160: note = Description of Unknown: uncultivated organism with predicted taxonomy: Dialister invisus
  REGION 1..160: note = MG15-9 HNH domain
ELARNFRDRKKMEKGMQENQAKNEKIRQRLISEFGVLRPKGMDIVKFKLCEEQNGECAYSQKHFDMEKLLRDPSYAEVDHIIPYSRSFDDSYNNKVLVLTKENREKRNRIPMEYLADATERKNRFIHWVKSTIRNSRKRENLLRTDYTETTENEWKRRNL

SEQ ID NO: 4572 - protein, 160 aa, unidentified
  REGION 1..160: note = Description of Unknown: uncultivated organism with predicted taxonomy: Dialister
  REGION 1..160: note = MG15-10 HNH domain
ELARNFRDRKKMEKGMQENQAKNEKIRQCLISEFGVLRPKGMDIVKFKLCEEQNGECAYSQKHFDMEKLLRDPSYAEVDHIIPYSRSFDDSYNNKVLVLTKENREKRNRIPMEYLADAPERKNRFIHWVKSTIRNSRKRENLLRIDYTETTENEWKRRNL

SEQ ID NO: 4573 - protein, 160 aa, unidentified
  REGION 1..160: note = Description of Unknown: uncultivated organism with predicted taxonomy: Dialister
  REGION 1..160: note = MG15-11 HNH domain
ELARNFRDRKKMEKGMQENQAKNEKIRQRLISEFGVLRPKGMDIVKFKLCEEQNGECAYSQKHFDMEKLLRDPSYAEVDHIIPYSRSFDDSYNNKVLVLTKENREKRNRIPMEYLADAPERKNRFIHWVKSTIRNSRKRENLLRIDYTETTENEWKRRNL

SEQ ID NO: 4574 - protein, 160 aa, unidentified
  REGION 1..160: note = Description of Unknown: uncultivated organism with predicted taxonomy: Megasphaera micronuciformis
  REGION 1..160: note = MG15-12 HNH domain
ELAKSFDERQKMTKSIEENQSHNERIKERLQKEFNVPYPSGQDIVKLKLYEEQNETCAYSQKHMDAHRLFHENNYAEVDHIIPYSRSFDDTYNNKVLVLTAENRQKGNRTPMEYLSGDEARKKQFVAWVKSDVKKPRKRENLLREKFTDDAENDWKARHL

SEQ ID NO: 4575 - protein, 160 aa, unidentified
  REGION 1..160: note = Description of Unknown: uncultivated organism with predicted taxonomy: Megasphaera sp. AM44-1BH
  REGION 1..160: note = MG15-13 HNH domain
ELAKNFRDRKKMEKGMQENQAKNEKIRQRLMSEFGVLRPKGMDIVKFKLCEEQNGECAYSQKHFDMEKLLRDPSYAEVDHIIPYSRSFDDSYNNKVLVLTKENREKRNRIPMEYLADATERKNRFIHWVKSTIRNSRKRENLLRTDYTETIENEWKRRNL

SEQ ID NO: 4576 - protein, 160 aa, unidentified
  REGION 1..160: note = Description of Unknown: uncultivated organism with predicted taxonomy: Dialister
  REGION 1..160: note = MG15-14 HNH domain
ELAKNFRDRKKMEKGMQENQAKNEKIRQRLMSEFGVLRPKGMDIVKFKLCEEQNGECAYSQKHFDMEKLLRDPSYAEVDHIIPYSRSFDDSYNNKVLVLTKENREKRNRIPMEYLADAPERKNRFIHWVKSTIRNSRKRENLLRIDYTETTENEWKRRNL

SEQ ID NO: 4577 - protein, 160 aa, unidentified
  REGION 1..160: note = Description of Unknown: uncultivated organism with predicted taxonomy: Megasphaera micronuciformis
  REGION 1..160: note = MG15-15 HNH domain
ELAKSFDERQKMTKSIEENQSHNERIKERLQKEFNVPYPSGQDIVKLKLYEEQNETCAYSQKHIDAAKLFHDPNYAEVDHIIPYSRSFDDTYNNKVLVLTAENRQKGNRTPMEYLSGDEARKKQFVAWVKSDIKKPRKRENLLREKFTADAENDWKARHL

SEQ ID NO: 4578 - protein, 159 aa, unidentified
  REGION 1..159: note = Description of Unknown: uncultivated organism with predicted taxonomy: Megasphaera stantonii
  REGION 1..159: note = MG15-16 HNH domain
ELAKSAKERTELEKAMKDNQSRNEKIKTKLHELNVMQPTGLDIVKYKLYEQQQGDCAYSQKKFDVNRLLHDPTYAEVDHIIPYSRSFDDTYRNKVLVLTKENRDKGNRTPMEYFQDKPERKEAFINWVKRTISDGKKRNNLLRVNYSADAEKEWKDRHL

SEQ ID NO: 4579 - protein, 160 aa, unidentified; identical to SEQ ID NO: 4573
  REGION 1..160: note = Description of Unknown: uncultivated organism with predicted taxonomy: Dialister
  REGION 1..160: note = MG15-17 HNH domain

SEQ ID NO: 4580 - protein, 160 aa, unidentified
  REGION 1..160: note = Description of Unknown: uncultivated organism with predicted taxonomy: Megasphaera micronuciformis
  REGION 1..160: note = MG15-18 HNH domain
ELAKSFDERQKMTKSIEENQSHNERIKERLQKEFNVPYPSGQDIVKLKLYEEQNETCAYSQKHIDAAKLFHDPNYAEVDHIIPYSRSFDDTYNNKVLVLTAENRQKGNRTPMEYLSGDEARKKQFVAWVKSDIKKPRKRENLLREKFTADAENDWKVRHL

SEQ ID NO: 4581 - protein, 160 aa, unidentified
  REGION 1..160: note = Description of Unknown: uncultivated organism with predicted taxonomy: Megasphaera micronuciformis
  REGION 1..160: note = MG15-19 HNH domain
ELAKSFDERQKMTKSIEENQSHNERIKERLQKEFNVPYPSGQDIVKLKLYEEQNETCAYSQKHIDAAKLFHDPNYAEVDHIIPYSRSFDDTYNNKVLVLTAENRQKGNRTPMEYFSGDEARKKQFVAWVKSDIKKPRKRENLLREKFTADAENDWKIRHL

SEQ ID NO: 4582 - protein, 160 aa, unidentified; identical to SEQ ID NO: 4565
  REGION 1..160: note = Description of Unknown: uncultivated organism with predicted taxonomy: Dialister
  REGION 1..160: note = MG15-20 HNH domain

SEQ ID NO: 4583 - protein, 160 aa, unidentified; identical to SEQ ID NO: 4575
  REGION 1..160: note = Description of Unknown: uncultivated organism with predicted taxonomy: Dialister
  REGION 1..160: note = MG15-21 HNH domain

SEQ ID NO: 4584 - protein, 160 aa, unidentified
  REGION 1..160: note = Description of Unknown: uncultivated organism with predicted taxonomy: Dialister
  REGION 1..160: note = MG15-22 HNH domain
ELARSFRDRKKMEKGMQENQAKNEKIRQRLISEFGVLRPKGMDIVKSKLCEEQNGECAYSQKHFDMEKLLKDPSYAEVDHIIPYSRSFDDSYNNKVLVLTKENREKRNRIPMEYLADAPERKNRFIHWVKSTIRNSRKRENLLRTDYTATTENEWKRRNL

SEQ ID NO: 4585 - protein, 160 aa, unidentified
  REGION 1..160: note = Description of Unknown: uncultivated organism with predicted taxonomy: Dialister
  REGION 1..160: note = MG15-23 HNH domain
ELARNFRDRKKIEKGMQENQAKNEKIRQRLISEFGVLRPKGMDIVKFKLCEEQNGECAYSQKHFDMEKLLRDPSYAEVDHIIPYSRSFDDSYNNKVLVLTKENREKRNRIPMEYLADAPERKNRFIHWVKSTIRNSRKRENLLRIDYTETTENEWKRRNL

SEQ ID NO: 4586 - protein, 160 aa, unidentified
  REGION 1..160: note = Description of Unknown: uncultivated organism with predicted taxonomy: Dialister invisus
  REGION 1..160: note = MG15-24 HNH domain
ELAKNFRDRKKMEKGMQENQAKNEKIRQRLMSEFGVLCPKGMDIVKFKLCEEQNGECAYSQKHFDMEKLLKDPSYAEVDHIIPYSRSFDDSYNNKVLVLTKENREKRNRIPMEYLADAPEQKNRFIHWVKSTIRNSRKRENLLRTDYTAATENEWKRRNL

SEQ ID NO: 4587 - protein, 160 aa, unidentified; identical to SEQ ID NO: 4586
  REGION 1..160: note = Description of Unknown: uncultivated organism with predicted taxonomy: Dialister
  REGION 1..160: note = MG15-25 HNH domain

SEQ ID NO: 4588 - protein, 160 aa, unidentified; identical to SEQ ID NO: 4565
  REGION 1..160: note = Description of Unknown: uncultivated organism with predicted taxonomy: Dialister
  REGION 1..160: note = MG15-26 HNH domain

SEQ ID NO: 4589 - protein, 160 aa, unidentified; identical to SEQ ID NO: 4573
  REGION 1..160: note = Description of Unknown: uncultivated organism with predicted taxonomy: Dialister
  REGION 1..160: note = MG15-27 HNH domain

SEQ ID NO: 4590 - protein, 160 aa, unidentified; identical to SEQ ID NO: 4565
  REGION 1..160: note = Description of Unknown: uncultivated organism with predicted taxonomy: Dialister
  REGION 1..160: note = MG15-28 HNH domain

SEQ ID NO: 4591 - protein, 160 aa, unidentified; identical to SEQ ID NO: 4565
  REGION 1..160: note = Description of Unknown: uncultivated organism with predicted taxonomy: Dialister invisus
  REGION 1..160: note = MG15-29 HNH domain

SEQ ID NO: 4592 - protein, 160 aa, unidentified; identical to SEQ ID NO: 4575
  REGION 1..160: note = Description of Unknown: uncultivated organism with predicted taxonomy: Megasphaera sp. AM44-1BH
  REGION 1..160: note = MG15-30 HNH domain

SEQ ID NO: 4593 - protein, 160 aa, unidentified
  REGION 1..160: note = Description of Unknown: uncultivated organism with predicted taxonomy: Dialister
  REGION 1..160: note = MG15-31 HNH domain
ELARSFRDRKKMEKGMQENQAKNEKIRQRLISEFGVLRPKGMDIVKFKLCEEQNGECAYSQKHFDMEKLLKDPSYAEVDHIIPYSRSFDDSYNNKVLVLTKENREKRNRIPMEYLADAPERKNRFIHWVKRTIRNSRKRENLLRTDYTATTENEWKRRNL

SEQ ID NO: 4594 - protein, 160 aa, unidentified; identical to SEQ ID NO: 4565
  REGION 1..160: note = Description of Unknown: uncultivated organism with predicted taxonomy: Veillonellales
  REGION 1..160: note = MG15-32 HNH domain

SEQ ID NO: 4595 - protein, 160 aa, unidentified; identical to SEQ ID NO: 4573
  REGION 1..160: note = Description of Unknown: uncultivated organism with predicted taxonomy: Dialister
  REGION 1..160: note = MG15-33 HNH domain

SEQ ID NO: 4596 - protein, 160 aa, unidentified; identical to SEQ ID NO: 4586
  REGION 1..160: note = Description of Unknown: uncultivated organism with predicted taxonomy: Megasphaera
  REGION 1..160: note = MG15-34 HNH domain

SEQ ID NO: 4597 - protein, 159 aa, unidentified
  REGION 1..159: note = Description of Unknown: uncultivated organism with predicted taxonomy: Megasphaera
  REGION 1..159: note = MG15-35 HNH domain
ELAKSAKERTELEKAMKDNQSRNEKIKTKLHELNVMQPTGLDIVKYKLYKQQQGDCAYSQKKFDVNRLLHDPTYAEVDHIIPYSRSFDDTYRNKVLVLTKENRDKGNRTPMEYFQDKPERKEAFINWVKRTISDGKKRNNLLRVNYSADAEKEWKDRHL

SEQ ID NO: 4598 - protein, 160 aa, unidentified; identical to SEQ ID NO: 4586
  REGION 1..160: note = Description of Unknown: uncultivated organism with predicted taxonomy: Dialister
  REGION 1..160: note = MG15-36 HNH domain

SEQ ID NO: 4599 - protein, 160 aa, unidentified; identical to SEQ ID NO: 4586
  REGION 1..160: note = Description of Unknown: uncultivated organism with predicted taxonomy: Dialister
  REGION 1..160: note = MG15-37 HNH domain

SEQ ID NO: 4600 - protein, 160 aa, unidentified
  REGION 1..160: note = Description of Unknown: uncultivated organism with predicted taxonomy: Selenomonas bovis
  REGION 1..160: note = MG15-38 HNH domain
EMARSRQDRDKMEKDIKNNRARNEAIKKELQELGLRNPKGQDIIKWRLYKEQDGFCAYSQKQFDVERLLHDGSYAEIDHILPYSRSFDDSYHNKVLVMAAENRQKGNRTPLEYMAGEEERIHAFRIWVNSRIHDFRKRQNLLREHFDKESTEKDWKERNL

SEQ ID NO: 4601 - protein, 160 aa, unidentified; identical to SEQ ID NO: 4565
  REGION 1..160: note = Description of Unknown: uncultivated organism with predicted taxonomy: Dialister
  REGION 1..160: note = MG15-39 HNH domain

SEQ ID NO: 4602 - protein, 160 aa, unidentified; identical to SEQ ID NO: 4565
  REGION 1..160: note = Description of Unknown: uncultivated organism with predicted taxonomy: Dialister
  REGION 1..160: note = MG15-40 HNH domain

SEQ ID NO: 4603 - protein, 160 aa, unidentified
  REGION 1..160: note = Description of Unknown: uncultivated organism with predicted taxonomy: Megasphaera sp. AM44-1BH
  REGION 1..160: note = MG15-41 HNH domain
ELARSFQNRVKMQKSMEENQSRNEKIKERLVQEYNILSPTGMDIVKFKLYEQQQGACAYSQKMFNIYQLFHDPSYAEVDHIIPYSRSFDDSYRNKVLVFTAENRNKGNRTPMEYLKNQSERKEQFITWVKNTIRDYKKRNNLLRETYTSEDEADWKRRHL

SEQ ID NO: 4604 - protein, 160 aa, unidentified
  REGION 1..160: note = Description of Unknown: uncultivated organism with predicted taxonomy: Veillonellales
  REGION 1..160: note = MG15-42 HNH domain
ELARNFEDRRTMQKSMEDNQKRNEEIKERLVKEYNVLQPTGMDIVKFKLYEEQQGACAYSQKMFDVNRVLHDPSYSEVDHIIPYSRSFDDSYNNKVLVLTKENRDKGNRTPMEYLKDNPVRIDAFTTWVNAIVRNSRKRANLLKSSFTEDAEQEWKRRHL

SEQ ID NO: 4605 - protein, 160 aa, unidentified; identical to SEQ ID NO: 4573
  REGION 1..160: note = Description of Unknown: uncultivated organism with predicted taxonomy: Veillonellales
  REGION 1..160: note = MG15-43 HNH domain

SEQ ID NO: 4606 - protein, 160 aa, unidentified; identical to SEQ ID NO: 4604
  REGION 1..160: note = Description of Unknown: uncultivated organism with predicted taxonomy: Veillonellales
  REGION 1..160: note = MG15-44 HNH domain

SEQ ID NO: 4607 - protein, 160 aa, unidentified; identical to SEQ ID NO: 4600
  REGION 1..160: note = Description of Unknown: uncultivated organism with predicted taxonomy: Selenomonas bovis
  REGION 1..160: note = MG15-45 HNH domain

SEQ ID NO: 4608 - protein, 160 aa, unidentified
  REGION 1..160: note = Description of Unknown: uncultivated organism with predicted taxonomy: Dialister
  REGION 1..160: note = MG15-46 HNH domain
ELAKNFRDRKKMEKGMQENQAKNEKIRQRLMSEFGVLRPKGMDIVKFKLCEEQNGECAYSQKHFDMEKLLRDPSYAEVDHIIPYSRSFDDSYNNKVLVLTKENREKRNRIPMEYLADATERKNRFIHWVKSTIRNSRKRENLLRTDYTETTENEWKRRNL

SEQ ID NO: 4609 - protein, 160 aa, unidentified
  REGION 1..160: note = Description of Unknown: uncultivated organism with predicted taxonomy: Dialister
  REGION 1..160: note = MG15-47 HNH domain
ELARSFKDRAAMDHRMKENYAKNEKIKERLSKEFHIMNPRGQDIVKWKLYEQQQGCCAYSQKPFDVDRLLHDGNYAEVDHILPYSRSFDDTYRNKVLVLEKENRDKGNRTPMEYLADKPERKEKFIAWVKTTIKDSKKREHLLRVKYGRDEEAEWKQRHL

SEQ ID NO: 4610 - protein, 160 aa, unidentified; identical to SEQ ID NO: 4600
  REGION 1..160: note = Description of Unknown: uncultivated organism with predicted taxonomy: Selenomonas bovis
  REGION 1..160: note = MG15-48 HNH domain

SEQ ID NO: 4611 - protein, 160 aa, unidentified; identical to SEQ ID NO: 4586
  REGION 1..160: note = Description of Unknown: uncultivated organism with predicted taxonomy: Dialister
  REGION 1..160: note = MG15-49 HNH domain

SEQ ID NO: 4612 - protein, 160 aa, unidentified; identical to SEQ ID NO: 4565
  REGION 1..160: note = Description of Unknown: uncultivated organism with predicted taxonomy: Dialister
  REGION 1..160: note = MG15-50 HNH domain

SEQ ID NO: 4613 - protein, 160 aa, unidentified; identical to SEQ ID NO: 4573
  REGION 1..160: note = Description of Unknown: uncultivated organism with predicted taxonomy: Dialister
  REGION 1..160: note = MG15-51 HNH domain

SEQ ID NO: 4614 - protein, 160 aa, unidentified; identical to SEQ ID NO: 4586
  REGION 1..160: note = Description of Unknown: uncultivated organism with predicted taxonomy: Veillonellales
  REGION 1..160: note = MG15-52 HNH domain

SEQ ID NO: 4615 - protein, 160 aa, unidentified; identical to SEQ ID NO: 4586
  REGION 1..160: note = Description of Unknown: uncultivated organism with predicted taxonomy: Dialister invisus
  REGION 1..160: note = MG15-53 HNH domain

SEQ ID NO: 4616 - protein, 160 aa, unidentified; identical to SEQ ID NO: 4573
  REGION 1..160: note = Description of Unknown: uncultivated organism with predicted taxonomy: Dialister
  REGION 1..160: note = MG15-54 HNH domain

SEQ ID NO: 4617 - protein, 160 aa, unidentified
  REGION 1..160: note = Description of Unknown: uncultivated organism with predicted taxonomy: Megasphaera stantonii
  REGION 1..160: note = MG15-55 HNH domain
ELAKSFDERQKMTKSIEENQSHNERIKERLQKEFNVPYPSGQDIVKLKLYEEQNETCAYSQKHIDAAKLFHDPNYAEVDHIIPYSRSFDDTYNNKVLVLTAENRQKGNRTPMEYLSGDEARKKQFVAWVKSDVKKPRKRENLLREKFTADAENDWKVRHL

SEQ ID NO: 4618 - protein, 160 aa, unidentified; identical to SEQ ID NO: 4600
  REGION 1..160: note = Description of Unknown: uncultivated organism with predicted taxonomy: Selenomonas bovis
  REGION 1..160: note = MG15-56 HNH domain

SEQ ID NO: 4619 - protein, 160 aa, unidentified; identical to SEQ ID NO: 4573
  REGION 1..160: note = Description of Unknown: uncultivated organism with predicted taxonomy: Dialister
  REGION 1..160: note = MG15-57 HNH domain

SEQ ID NO: 4620 - protein, 160 aa, unidentified; identical to SEQ ID NO: 4608
  REGION 1..160: note = Description of Unknown: uncultivated organism with predicted taxonomy: Dialister
  REGION 1..160: note = MG15-58 HNH domain

SEQ ID NO: 4621 - protein, 160 aa, unidentified; identical to SEQ ID NO: 4608
  REGION 1..160: note = Description of Unknown: uncultivated organism with predicted taxonomy: Dialister
  REGION 1..160: note = MG15-59 HNH domain

SEQ ID NO: 4622 - protein, 160 aa, unidentified; identical to SEQ ID NO: 4586
  REGION 1..160: note = Description of Unknown: uncultivated organism with predicted taxonomy: Megasphaera
  REGION 1..160: note = MG15-60 HNH domain

SEQ ID NO: 4623 - protein, 160 aa, unidentified; identical to SEQ ID NO: 4586
  REGION 1..160: note = Description of Unknown: uncultivated organism with predicted taxonomy: Dialister
  REGION 1..160: note = MG15-61 HNH domain

SEQ ID NO: 4624 - protein, 160 aa, unidentified; identical to SEQ ID NO: 4580
  REGION 1..160: note = Description of Unknown: uncultivated organism with predicted taxonomy: Megasphaera stantonii
  REGION 1..160: note = MG15-62 HNH domain

SEQ ID NO: 4625 - protein, 160 aa, unidentified
  REGION 1..160: note = Description of Unknown: uncultivated organism with predicted taxonomy: Dialister
  REGION 1..160: note = MG15-63 HNH domain
ELARNFRDRKKMEKGMQENQAKNEKIRQRLISEFGVLRPKGMDIVKFKLCEEQNGECAYSQKHFDMEKLLRDPSYAEVDHIIPYSRSFDDSYNNKVLVLTKENREKRNRIPMEYLADAPERKNRLIHWVKSTIRNSRKRENLLRIDYTETTENEWKRRNL

SEQ ID NO: 4626 - protein, 160 aa, unidentified; identical to SEQ ID NO: 4608
  REGION 1..160: note = Description of Unknown: uncultivated organism with predicted taxonomy: Megasphaera
  REGION 1..160: note = MG15-64 HNH domain

SEQ ID NO: 4627 - protein, 160 aa, unidentified; identical to SEQ ID NO: 4565
  REGION 1..160: note = Description of Unknown: uncultivated organism with predicted taxonomy: Dialister
  REGION 1..160: note = MG15-65 HNH domain

SEQ ID NO: 4628 - protein, 160 aa, unidentified; identical to SEQ ID NO: 4577
  REGION 1..160: note = Description of Unknown: uncultivated organism with predicted taxonomy: Megasphaera micronuciformis
  REGION 1..160: note = MG15-66 HNH domain

SEQ ID NO: 4629 - protein, 160 aa, unidentified
  REGION 1..160: note = Description of Unknown: uncultivated organism with predicted taxonomy: Megasphaera stantonii
  REGION 1..160: note = MG15-67 HNH domain
ELAKSFDERQKMAKSIEENQSHNERIKERLQKEFNVPYPSGQDIVKLKLYEEQNETCAYSQKHMDAHRLFHEDNYAEVDHIIPYSRSFDDTYNNKVLVLTAENRQKGNRTPMEYLSGDEARKKQFVAWVKSDIKKPRKRENLLREKFTTDAENDWKIRHL

SEQ ID NO: 4630 - protein, 159 aa, unidentified
  REGION 1..159: note = Description of Unknown: uncultivated organism with predicted taxonomy: Veillonellaceae bacterium DNF00626
  REGION 1..159: note = MG15-68 HNH domain
DLGRNFKDRDLIKSNMEKNQKKNDEIKERIVNEFGIMQPKSQDIVKLKLCEQQDNVCVYSQKSFDLHRLFEKNYVEVDHIIPYSRSFDDTYANKVLVFNKENRDKGNKLPLEYLANQPERKEKFIAWVKSHIKDRKKRDNLLRESYSAEDKNGWKQRNL

SEQ ID NO: 4631 - protein, 160 aa, unidentified
  REGION 1..160: note = Description of Unknown: uncultivated organism with predicted taxonomy: Dialister
  REGION 1..160: note = MG15-69 HNH domain
ELARSFKDRAAMDDRMKENHAKNEEIKEYLSKELHVMSPTGQDIVKWKLYKQQQGYCAYSQKLFDVDKLLHDRTYAEVDHILPYSRSFDDTYRNKVLVLTKENRDKGNRTPMEYLADKPERKEKFIAWVKTTIKDSKKREHLLRVKYGRDEEAEWKQRHL

SEQ ID NO: 4632 - protein, 160 aa, unidentified; identical to SEQ ID NO: 4573
  REGION 1..160: note = Description of Unknown: uncultivated organism with predicted taxonomy: Dialister
  REGION 1..160: note = MG15-70 HNH domain

SEQ ID NO: 4633 - protein, 160 aa, unidentified; identical to SEQ ID NO: 4608
  REGION 1..160: note = Description of Unknown: uncultivated organism with predicted taxonomy: Dialister
  REGION 1..160: note = MG15-71 HNH domain

SEQ ID NO: 4634 - protein, 160 aa, unidentified; identical to SEQ ID NO: 4585
  REGION 1..160: note = Description of Unknown: uncultivated organism with predicted taxonomy: Dialister
  REGION 1..160: note = MG15-72 HNH domain

SEQ ID NO: 4635 - protein, 160 aa, unidentified; identical to SEQ ID NO: 4586
  REGION 1..160: note = Description of Unknown: uncultivated organism with predicted taxonomy: Dialister invisus
  REGION 1..160: note = MG15-73 HNH domain

SEQ ID NO: 4636 - protein, 160 aa, unidentified; identical to SEQ ID NO: 4586
  REGION 1..160: note = Description of Unknown: uncultivated organism with predicted taxonomy: Dialister
  REGION 1..160: note = MG15-74 HNH domain

SEQ ID NO: 4637 - protein, 160 aa, unidentified; identical to SEQ ID NO: 4586
  REGION 1..160: note = Description of Unknown: uncultivated organism with predicted taxonomy: Dialister invisus
  REGION 1..160: note = MG15-75 HNH domain

SEQ ID NO: 4638 - protein, 160 aa, unidentified; identical to SEQ ID NO: 4565
  REGION 1..160: note = Description of Unknown: uncultivated organism with predicted taxonomy: Dialister
  REGION 1..160: note = MG15-76 HNH domain

SEQ ID NO: 4639 - protein, 160 aa, unidentified; identical to SEQ ID NO: 4573
  REGION 1..160: note = Description of Unknown: uncultivated organism with predicted taxonomy: Dialister invisus
  REGION 1..160: note = MG15-77 HNH domain

SEQ ID NO: 4640 - protein, 160 aa, unidentified; identical to SEQ ID NO: 4586
  REGION 1..160: note = Description of Unknown: uncultivated organism with predicted taxonomy: Dialister
  REGION 1..160: note = MG15-78 HNH domain

SEQ ID NO: 4641 - protein, 160 aa, unidentified; identical to SEQ ID NO: 4565
  REGION 1..160: note = Description of Unknown: uncultivated organism with predicted taxonomy: Megasphaera stantonii
  REGION 1..160: note = MG15-79 HNH domain

SEQ ID NO: 4642 - protein, 160 aa, unidentified; identical to SEQ ID NO: 4575
  REGION 1..160: note = Description of Unknown: uncultivated organism with predicted taxonomy: Megasphaera sp. AM44-1BH
  REGION 1..160: note = MG15-80 HNH domain

SEQ ID NO: 4643 - protein, 160 aa, unidentified; identical to SEQ ID NO: 4565
  REGION 1..160: note = Description of Unknown: uncultivated organism with predicted taxonomy: Megasphaera
  REGION 1..160: note = MG15-81 HNH domain

SEQ ID NO: 4644 - protein, 160 aa, unidentified; identical to SEQ ID NO: 4575
  REGION 1..160: note = Description of Unknown: uncultivated organism with predicted taxonomy: Megasphaera sp. AM44-1BH
  REGION 1..160: note = MG15-82 HNH domain

SEQ ID NO: 4645 - protein, 159 aa, unidentified; identical to SEQ ID NO: 4630
  REGION 1..159: note = Description of Unknown: uncultivated organism with predicted taxonomy: Veillonellaceae bacterium DNF00626
  REGION 1..159: note = MG15-83 HNH domain

SEQ ID NO: 4646 - protein, 160 aa, unidentified; identical to SEQ ID NO: 4575
  REGION 1..160: note = Description of Unknown: uncultivated organism with predicted taxonomy: Dialister
  REGION 1..160: note = MG15-84 HNH domain

SEQ ID NO: 4647 - protein, 160 aa, unidentified; identical to SEQ ID NO: 4575
  REGION 1..160: note = Description of Unknown: uncultivated organism with predicted taxonomy: Dialister
  REGION 1..160: note = MG15-85 HNH domain

SEQ ID NO: 4648 - protein, 160 aa, unidentified; identical to SEQ ID NO: 4573
  REGION 1..160: note = Description of Unknown: uncultivated organism with predicted taxonomy: Dialister
  REGION 1..160: note = MG15-86 HNH domain

SEQ ID NO: 4649 - protein, 160 aa, unidentified; identical to SEQ ID NO: 4593
  REGION 1..160: note = Description of Unknown: uncultivated organism with predicted taxonomy: Dialister
  REGION 1..160: note = MG15-87 HNH domain

SEQ ID NO: 4650 - protein, 160 aa, unidentified
  REGION 1..160: note = Description of Unknown: uncultivated organism with predicted taxonomy: Megasphaera sp. AM44-1BH
  REGION 1..160: note = MG15-88 HNH domain
ELAKNFRDRKKMEKGMQENQAKNEKIRQRLMSEFGVLRPKGMDIVKFKLCEEQNGECAYSQKHFDMEKLLRDPSYAEVDHIIPYSRSFDDSYNNKVLVLTKENRKKRNRIPMEYLADATERKNRFIHWVKSTIRNSRKRENLLRTDYTETTENEWKRRNL

SEQ ID NO: 4651 - protein, 160 aa, unidentified; identical to SEQ ID NO: 4573
  REGION 1..160: note = Description of Unknown: uncultivated organism with predicted taxonomy: Dialister
  REGION 1..160: note = MG15-89 HNH domain

SEQ ID NO: 4652 - protein, 160 aa, unidentified; identical to SEQ ID NO: 4576
  REGION 1..160: note = Description of Unknown: uncultivated organism with predicted taxonomy: Dialister
  REGION 1..160: note = MG15-90 HNH domain

SEQ ID NO: 4653 - protein, 160 aa, unidentified; identical to SEQ ID NO: 4608
  REGION 1..160: note = Description of Unknown: uncultivated organism with predicted taxonomy: Dialister
  REGION 1..160: note = MG15-91 HNH domain

SEQ ID NO: 4654 - protein, 159 aa, unidentified; identical to SEQ ID NO: 4578
  REGION 1..159: note = Description of Unknown: uncultivated organism with predicted taxonomy: Firmicutes
  REGION 1..159: note = MG15-92 HNH domain

SEQ ID NO: 4655 - protein, 160 aa, unidentified
  REGION 1..160: note = Description of Unknown: uncultivated organism with predicted taxonomy: Megasphaera micronuciformis
  REGION 1..160: note = MG15-93 HNH domain
ELAKSFDERQKMTKSIEENQSHNERIKERLQKEFNVPYPSGQDIVKLKLYEEQNETCAYSQKHIDAAKLFHDRNYAEVDHIIPYSRSFDDTYNNKVLVLTAENRQKGNRTPMEYLSGDEARKKQFVAWVKSDIKKPRKRENLLREKFTADAENDWKARHL

SEQ ID NO: 4656 - protein, 160 aa, unidentified; identical to SEQ ID NO: 4586
  REGION 1..160: note = Description of Unknown: uncultivated organism with predicted taxonomy: Dialister
  REGION 1..160: note = MG15-94 HNH domain

SEQ ID NO: 4657 - protein, 160 aa, unidentified; identical to SEQ ID NO: 4586
  REGION 1..160: note = Description of Unknown: uncultivated organism with predicted taxonomy: Dialister
  REGION 1..160: note = MG15-95 HNH domain

SEQ ID NO: 4658 - protein, 160 aa, unidentified
  REGION 1..160: note = Description of Unknown: uncultivated organism with predicted taxonomy: Megasphaera micronuciformis
  REGION 1..160: note = MG15-96 HNH domain
ELAKSFDERQKMTKSIEENQSHNERIKERLQKEFNVPYPSGQDIVKLKLYEEQNEICAYSQKHIDAAKLFHDPNYAEVDHIIPYSRSFDDTYNNKVLVLTAENRQKGNRTPMEYLSGDEARKKQFVAWVKSDIKKPRKRENLLREKFTTDAENDWKARHL

SEQ ID NO: 4659 - protein, 160 aa, unidentified; identical to SEQ ID NO: 4581
  REGION 1..160: note = Description of Unknown: uncultivated organism with predicted taxonomy: Megasphaera micronuciformis
  REGION 1..160: note = MG15-97 HNH domain

SEQ ID NO: 4660 - protein, 160 aa, unidentified; identical to SEQ ID NO: 4565
  REGION 1..160: note = Description of Unknown: uncultivated organism with predicted taxonomy: Dialister
  REGION 1..160: note = MG15-98 HNH domain

SEQ ID NO: 4661 - protein, 160 aa, unidentified; identical to SEQ ID NO: 4577
  REGION 1..160: note = Description of Unknown: uncultivated organism with predicted taxonomy: Megasphaera micronuciformis
  REGION 1..160: note = MG15-99 HNH domain

SEQ ID NO: 4662 - protein, 160 aa, unidentified; identical to SEQ ID NO: 4580
  REGION 1..160: note = Description of Unknown: uncultivated organism with predicted taxonomy: Megasphaera stantonii
  REGION 1..160: note = MG15-100 HNH domain

SEQ ID NO: 4663 - protein, 160 aa, unidentified; identical to SEQ ID NO: 4586
  REGION 1..160: note = Description of Unknown: uncultivated organism with predicted taxonomy: Dialister
  REGION 1..160: note = MG15-101 HNH domain

SEQ ID NO: 4664 - protein, 160 aa, unidentified; identical to SEQ ID NO: 4565
  REGION 1..160: note = Description of Unknown: uncultivated organism with predicted taxonomy: Megasphaera
  REGION 1..160: note = MG15-102 HNH domain

SEQ ID NO: 4665 - protein, 160 aa, unidentified; identical to SEQ ID NO: 4603
  REGION 1..160: note = Description of Unknown: uncultivated organism with predicted taxonomy: Megasphaera sp. AM44-1BH
  REGION 1..160: note = MG15-103 HNH domain

SEQ ID NO: 4666 - protein, 160 aa, unidentified
  REGION 1..160: note = Description of Unknown: uncultivated organism with predicted taxonomy: Dialister
  REGION 1..160: note = MG15-104 HNH domain
ELARNFRDRKKMEKGMQENQAKNEKIRQRLISEFGVLRPKGMDIVKFKLCEEQNGECAYSQKHFDMEKLLKDPSYAEVDHIIPYSRSFDDSYNNKVLVLTKENREKRNRIPMEYLADAPERKNRFIHWVKSTIRNSRKRENLLRTDYTATTENEWKRRNL

SEQ ID NO: 4667 - protein, 160 aa, unidentified; identical to SEQ ID NO: 4577
  REGION 1..160: note = Description of Unknown: uncultivated organism with predicted taxonomy: Megasphaera micronuciformis
  REGION 1..160: note = MG15-105 HNH domain

SEQ ID NO: 4668 - protein, 160 aa, unidentified; identical to SEQ ID NO: 4584
  REGION 1..160: note = Description of Unknown: uncultivated organism with predicted taxonomy: Dialister
  REGION 1..160: note = MG15-106 HNH domain

SEQ ID NO: 4669 - protein, 160 aa, unidentified; identical to SEQ ID NO: 4565
  REGION 1..160: note = Description of Unknown: uncultivated organism with predicted taxonomy: Dialister
  REGION 1..160: note = MG15-107 HNH domain

SEQ ID NO: 4670 - protein, 160 aa, unidentified; identical to SEQ ID NO: 4565
  REGION 1..160: note = Description of Unknown: uncultivated organism with predicted taxonomy: Dialister
  REGION 1..160: note = MG15-108 HNH domain

SEQ ID NO: 4671 - protein, 160 aa, unidentified; identical to SEQ ID NO: 4629
  REGION 1..160: note = Description of Unknown: uncultivated organism with predicted taxonomy: Megasphaera stantonii
  REGION 1..160: note = MG15-109 HNH domain

SEQ ID NO: 4672 - protein, 160 aa, unidentified; identical to SEQ ID NO: 4625
  REGION 1..160: note = Description of Unknown: uncultivated organism with predicted taxonomy: Dialister
  REGION 1..160: note = MG15-110 HNH domain

SEQ ID NO: 4673 - protein, 160 aa, unidentified; identical to SEQ ID NO: 4565
  REGION 1..160: note = Description of Unknown: uncultivated organism with predicted taxonomy: Veillonellales
  REGION 1..160: note = MG15-111 HNH domain

SEQ ID NO: 4674 - protein, 160 aa, unidentified; identical to SEQ ID NO: 4586
  REGION 1..160: note = Description of Unknown: uncultivated organism with predicted taxonomy: Dialister
  REGION 1..160: note = MG15-112 HNH domain

SEQ ID NO: 4675 - protein, 160 aa, unidentified; identical to SEQ ID NO: 4565
  REGION 1..160: note = Description of Unknown: uncultivated organism with predicted taxonomy: Dialister
  REGION 1..160: note = MG15-113 HNH domain

SEQ ID NO: 4676 - protein, 160 aa, unidentified
  REGION 1..160: note = Description of Unknown: uncultivated organism with predicted taxonomy: Veillonellales
  REGION 1..160: note = MG15-114 HNH domain
ELARSFKDRAAMDDRMKENHAKNEEIKEYLSKELHVMSPTGQDIVKWKLYKQQQGYCAYSQKPFDVNKLLHDRTYAEVDHILPYSRSFDDTYRNKVLVLTKENRDKGNRTPMEYLADKPERKGKFIAWVKTTIKDSKKREHLLRVKYGRDEEAEWKQRHL

SEQ ID NO: 4677 - protein, 160 aa, unidentified; identical to SEQ ID NO: 4565
  REGION 1..160: note = Description of Unknown: uncultivated organism with predicted taxonomy: Dialister
  REGION 1..160: note = MG15-115 HNH domain

SEQ ID NO: 4678 - protein, 160 aa, unidentified; identical to SEQ ID NO: 4575
  REGION 1..160: note = Description of Unknown: uncultivated organism with predicted taxonomy: Megasphaera sp. AM44-1BH
  REGION 1..160: note = MG15-116 HNH domain

SEQ ID NO: 4679 - protein, 159 aa, unidentified; identical to SEQ ID NO: 4597
  REGION 1..159: note = Description of Unknown: uncultivated organism with predicted taxonomy: Megasphaera
  REGION 1..159: note = MG15-117 HNH domain

SEQ ID NO: 4680 - protein, 160 aa, unidentified; identical to SEQ ID NO: 4573
  REGION 1..160: note = Description of Unknown: uncultivated organism with predicted taxonomy: Dialister
  REGION 1..160: note = MG15-118 HNH domain

SEQ ID NO: 4681 - protein, 160 aa, unidentified; identical to SEQ ID NO: 4609
  REGION 1..160: note = Description of Unknown: uncultivated organism with predicted taxonomy: Dialister
  REGION 1..160: note = MG15-119 HNH domain

SEQ ID NO: 4682 - protein, 160 aa, unidentified
  REGION 1..160: note = Description of Unknown: uncultivated organism with predicted taxonomy: Megasphaera micronuciformis
  REGION 1..160: note = MG15-120 HNH domain
ELAKSFDERQKMTKSIEENQSHNERIKERLQKEFNVPYPSGQDIVKLKLYEEQNETCAYSQKHIDAAKLFHDPNYAEVDHIIPYSRSFDDTYNNKVLVLTAENRQKGNRTPMEYLNGDEARKKQFVAWVKSDIKKPRKRENLLREKFTDDVENDWKERHL

SEQ ID NO: 4683 - protein, 160 aa, unidentified; identical to SEQ ID NO: 4577
  REGION 1..160: note = Description of Unknown: uncultivated organism with predicted taxonomy: Megasphaera micronuciformis
  REGION 1..160: note = MG15-121 HNH domain

SEQ ID NO: 4684 - protein, 160 aa, unidentified; identical to SEQ ID NO: 4586
  REGION 1..160: note = Description of Unknown: uncultivated organism with predicted taxonomy: Dialister invisus
  REGION 1..160: note = MG15-122 HNH domain

SEQ ID NO: 4685 - protein, 160 aa, unidentified; identical to SEQ ID NO: 4573
  REGION 1..160: note = Description of Unknown: uncultivated organism with predicted taxonomy: Megasphaera
  REGION 1..160: note = MG15-123 HNH domain

SEQ ID NO: 4686 - protein, 160 aa, unidentified
  REGION 1..160: note = Description of Unknown: uncultivated organism with predicted taxonomy: Dialister
  REGION 1..160: note = MG15-124 HNH domain
ELARNFRDRKKMEKGMQENQAKNEKIRQRLISEFGVLRPKGMDIVKFRLCEEQNGECAYSQKHFDMEKLLKDPSYAEVDHIIPYSRSFDDSYNNKVLVLTKENREKRNRIPMEYLADAPERKNRFIHWVKSTIRNSRKRENLLRTDYTATTENEWKRRNL

SEQ ID NO: 4687 - protein, 160 aa, unidentified; identical to SEQ ID NO: 4573
  REGION 1..160: note = Description of Unknown: uncultivated organism with predicted taxonomy: Dialister
  REGION 1..160: note = MG15-125 HNH domain

SEQ ID NO: 4688 - protein, 160 aa, unidentified
  REGION 1..160: note = Description of Unknown: uncultivated organism with predicted taxonomy: Megasphaera stantonii
  REGION 1..160: note = MG15-126 HNH domain
ELAKSFDERQKMTKSIEENQSHNERIKERLQKEFNVPYPSGQDIVKLKLYEEQNETCAYSQKHIDAAKLFHDPNYAEVDHIIPYSRSFDDTYNNKVLVLTAENRQKGNRTPMEYLSGDEARKKQFVAWVKSDIKKQRKRENLLREKFTADAENDWKARHL

SEQ ID NO: 4689 - protein, 160 aa, unidentified; identical to SEQ ID NO: 4608
  REGION 1..160: note = Description of Unknown: uncultivated organism with predicted taxonomy: Dialister
  REGION 1..160: note = MG15-127 HNH domain

SEQ ID NO: 4690 - protein, 160 aa, unidentified; identical to SEQ ID NO: 4608
  REGION 1..160: note = Description of Unknown: uncultivated organism with predicted taxonomy: Dialister invisus
  REGION 1..160: note = MG15-128 HNH domain

SEQ ID NO: 4691 - protein, 160 aa, unidentified; identical to SEQ ID NO: 4608
  REGION 1..160: note = Description of Unknown: uncultivated organism with predicted taxonomy: Dialister
  REGION 1..160: note = MG15-129 HNH domain

SEQ ID NO: 4692 - protein, 160 aa, unidentified; identical to SEQ ID NO: 4575
  REGION 1..160: note = Description of Unknown: uncultivated organism with predicted taxonomy: Dialister
  REGION 1..160: note = MG15-130 HNH domain

SEQ ID NO: 4693 - protein, 160 aa, unidentified; identical to SEQ ID NO: 4586
  REGION 1..160: note = Description of Unknown: uncultivated organism with predicted taxonomy: Dialister
  REGION 1..160: note = MG15-131 HNH domain

SEQ ID NO: 4694 - protein, 160 aa, unidentified; identical to SEQ ID NO: 4604
  REGION 1..160: note = Description of Unknown: uncultivated organism with predicted taxonomy: Veillonella magna
  REGION 1..160: note = MG15-132 HNH domain

SEQ ID NO: 4695 - protein, 160 aa, unidentified; identical to SEQ ID NO: 4565
  REGION 1..160: note = Description of Unknown: uncultivated organism with predicted taxonomy: Dialister
  REGION 1..160: note = MG15-133 HNH domain

SEQ ID NO: 4696 - protein, 160 aa, unidentified; identical to SEQ ID NO: 4577
  REGION 1..160: note = Description of Unknown: uncultivated organism with predicted taxonomy: Megasphaera micronuciformis
  REGION 1..160: note = MG15-134 HNH domain

SEQ ID NO: 4697 - protein, 160 aa, unidentified; identical to SEQ ID NO: 4580
  REGION 1..160: note = Description of Unknown: uncultivated organism with predicted taxonomy: Megasphaera micronuciformis
  REGION 1..160: note = MG15-135 HNH domain

SEQ ID NO: 4698 - protein, 160 aa, unidentified; identical to SEQ ID NO: 4586
  REGION 1..160: note = Description of Unknown: uncultivated organism with predicted taxonomy: Megasphaera stantonii
  REGION 1..160: note = MG15-136 HNH domain

SEQ ID NO: 4699 - protein, 160 aa, unidentified; identical to SEQ ID NO: 4603
  REGION 1..160: note = Description of Unknown: uncultivated organism with predicted taxonomy: Megasphaera sp. AM44-1BH
  REGION 1..160: note = MG15-137 HNH domain

SEQ ID NO: 4700 - protein, 159 aa, unidentified
  REGION 1..159: note = Description of Unknown: uncultivated organism with predicted taxonomy: Megasphaera
  REGION 1..159: note = MG15-138 HNH domain
ELAKNAKERTELEKAMKDNQSRNEEIKTKLHELNVMQPTGLDIVKYKLYEQQQGDCAYSQKKFDVDRLLHDSTYAEVDHIIPYSRSFDDTYRNKVLVLTKENRDKGNRTPMEYFQDKPERKEAFVRWVKRTISDGKKRNNLLRVNYSADAEKEWKDRHL

SEQ ID NO: 4701 - protein, 159 aa, unidentified
  REGION 1..159: note = Description of Unknown: uncultivated organism with predicted taxonomy: Megasphaera
  REGION 1..159: note = MG15-139 HNH domain
ELAKSAKERTELEKAMKDNQSRNEEIKTKLHELNVMQPTGLDIVKYKLYEQQQGDCAYSQKKFDVNRLLHDPTYAEVDHIIPYSRSFDDTYRNKVLVLTKENRDKGNRTPMEYFQDKPERKEAFINWVKRTISDGKKRNNLLRVNYSADAEKEWKDRHL

SEQ ID NO: 4702 - protein, 160 aa, unidentified; identical to SEQ ID NO: 4603
  REGION 1..160: note = Description of Unknown: uncultivated organism with predicted taxonomy: Megasphaera sp. AM44-1BH
  REGION 1..160: note = MG15-140 HNH domain

SEQ ID NO: 4703 - protein, 160 aa, unidentified; identical to SEQ ID NO: 4608
  REGION 1..160: note = Description of Unknown: uncultivated organism with predicted taxonomy: Dialister
  REGION 1..160: note = MG15-141 HNH domain

SEQ ID NO: 4704 - protein, 160 aa, unidentified; identical to SEQ ID NO: 4603
  REGION 1..160: note = Description of Unknown: uncultivated organism with predicted taxonomy: Megasphaera sp. AM44-1BH
  REGION 1..160: note = MG15-142 HNH domain

SEQ ID NO: 4705 - protein, 160 aa, unidentified; identical to SEQ ID NO: 4574
  REGION 1..160: note = Description of Unknown: uncultivated organism with predicted taxonomy: Megasphaera micronuciformis
  REGION 1..160: note = MG15-143 HNH domain

SEQ ID NO: 4706 - protein, 160 aa, unidentified; identical to SEQ ID NO: 4655
  REGION 1..160: note = Description of Unknown: uncultivated organism with predicted taxonomy: Megasphaera stantonii
  REGION 1..160: note = MG15-144 HNH domain

SEQ ID NO: 4707 - protein, 160 aa, unidentified; identical to SEQ ID NO: 4577
  REGION 1..160: note = Description of Unknown: uncultivated organism with predicted taxonomy: Megasphaera stantonii
  REGION 1..160: note = MG15-145 HNH domain

SEQ ID NO: 4708 - protein, 160 aa, unidentified
  REGION 1..160: note = Description of Unknown: uncultivated organism with predicted taxonomy: Megasphaera stantonii
  REGION 1..160: note = MG15-146 HNH domain
EMGRSFQERRDMMKSMEDNNAANEKLKEEIKKDYGIAHPNGLDIVKYKLFKEQGERCAYSLKPMDARQVLKDPSYAEVDHILPYSRSFDDSYANKVLVLAKENRDKGNRTPMEYMANLPERKHAFITWVKSNVRNPKKRDNLLLEKFDGDKEDAWKERHL

SEQ ID NO: 4709 - protein, 158 aa, unidentified
  REGION 1..158: note = Description of Unknown: uncultivated organism with predicted taxonomy: Selenomonas ruminantium
  REGION 1..158: note = MG15-147 HNH domain
EMARSKKDRDAMTTSMEKNRAENETIKRELMEKGLLSPKGLDIVKWKLYKEQQGVCAYSQKVIDVERLLHEGTYAEVDHILPYSRSFDDSYRNKVLVLTEENRKKGNRTPMEYFADMPERKHAFVTWCKGNIRDFKKREHLLKENYDREDAGWKDRHL

SEQ ID NO: 4710 - protein, 158 aa, unidentified
  REGION 1..158: note = Description of Unknown: uncultivated organism with predicted taxonomy: Selenomonas sp. AE3005
  REGION 1..158: note = MG15-148 HNH domain
EMARNFQDRRDMQHKMEDNRKANERIIQELRENGLLQPNGLDIVKWKLYKEQQGICAYSQKPFDVERLLHDGKYAEVDHILPYSRSLDDSYANKVLVMAGENQLKRNRTPLEYMADDEEKLNAFVCWANTSIRDLRKRQNLLRKNFHSEEKEWKDRHL

SEQ ID NO: 4711 - protein, 158 aa, unidentified
  REGION 1..158: note = Description of Unknown: uncultivated organism with predicted taxonomy: Selenomonas ruminantium
  REGION 1..158: note = MG15-149 HNH domain
EMARSKTDRDAMTSSMEKNRAANEKVKKELMEKGLLSPKGLDIVKWKLYKEQQGVCAYSQKVIDVERLLHEGTYAEVDHILPYSRSFDDSYRNKVLVLTEENRKKGNRTPMEYFADMPERKHAFVTWCKGNIRDFKKREHLLKENYDREDAGWKDRHL

SEQ ID NO: 4712 - protein, 159 aa, unidentified
  REGION 1..159: note = Description of Unknown: uncultivated organism with predicted taxonomy: Selenomonas ruminantium
  REGION 1..159: note = MG15-150 HNH domain
EMGRTFQERREMMKSMEDNNTKNEKLKEELKDYGVAHPSGLDIVKLKLYKEQGGVCAYSLAAMPIEKVLNDYDYAEVDHILPYSRSFDDSYANKVLVLAKENRDKGNRTPMEYMEKTPGKKHDFVTWVKASVRNPKKRDNLLLEKFDEDKEAAWKERHL

SEQ ID NO: 4713 - protein, 158 aa, unidentified
  REGION 1..158: note = Description of Unknown: uncultivated organism with predicted taxonomy: Selenomonas sp. AE3005
  REGION 1..158: note = MG15-151 HNH domain
EMARNFQDRRDMRHKMEDNRKANERIIQELRENGLLQPNGLDIVKWKLYKEQQGICAYSQKPFDVERLLHDGKYAEVDHILPYSRSLDDSYANKVLVMAGENQLKRNRTPLEYMADDEEKLNAFVCWANTSIRDLRKRQNLLRKNFHSEEKEWKDRHL

SEQ ID NO: 4714 - protein, 162 aa, unidentified
  REGION 1..162: note = Description of Unknown: uncultivated organism with predicted taxonomy: Selenomonas sp. AE3005
  REGION 1..162: note = MG15-152 HNH domain
EMARSFQDRKDMHNKMENNRKANEQIIKELRENGLLQPNGLDIVKWKLYKEQQGVCAYSQKTFDVERLLHDGKYDGKYAEVDHILPYSRSFDDSYTNKVLVMAGENQHKGNRTPWEYMRDNEEKWTSFACWTNTAIRDFRKRQNLLRKNFCSEEKEWKERHL

SEQ ID NO: 4715 - protein, 158 aa, unidentified
  REGION 1..158: note = Description of Unknown: uncultivated organism with predicted taxonomy: Selenomonas sp. AE3005
  REGION 1..158: note = MG15-153 HNH domain
EMARSFQDRRDMHNKMENNRKANEQIIKELRENGLLQPNGLDIVKWKLYKEQQGICAYSQKTFDVERLLHDGKYAEVDHILPYSRSFDDSYTNKVLVMAGENQHKGNRTPWEYMRDNEEKWTSFACWTNTAIRDFRKRQNLLRKNFCSEEKEWKERHL

SEQ ID NO: 4716 - protein, 158 aa, unidentified; identical to SEQ ID NO: 4711
  REGION 1..158: note = Description of Unknown: uncultivated organism with predicted taxonomy: Selenomonas ruminantium
  REGION 1..158: note = MG15-154 HNH domain

SEQ ID NO: 4717 - protein, 158 aa, unidentified
  REGION 1..158: note = Description of Unknown: uncultivated organism with predicted taxonomy: Selenomonas sp. AE3005
  REGION 1..158: note = MG15-155 HNH domain
EMARSFQDRKDMHNKMENNRKANEQIIKELRENGLLQPNGLDIVKWKLYKEQQGVCAYSQKTFDVERLLHDGKYAEVDHILPYSRSFDDSYTNKVLVMAGENQHKGNRTPWEYMSNNEEKWTAFACWTNTAIRDFRKRQNLLRKKFCSEEKEWKERHL

SEQ ID NO: 4718 - protein, 158 aa, unidentified
  REGION 1..158: note = Description of Unknown: uncultivated organism with predicted taxonomy: Selenomonas sp. AE3005
  REGION 1..158: note = MG15-156 HNH domain
EMARNFQDRRDMQHKMEDNRKANERIIQELRENGLLQPNGLDIVKWKLYKEQQGICAYSQKPFDVERLLHDGKYAEVDHILPYSRSLDDSYANKVLVMAGENQLKRNRTPLEYMADDEEKQNAFVCWANTSIRDLRKRQNLLRKNFHSEEKEWKDRHL

SEQ ID NO: 4719 - protein, 159 aa, unidentified
  REGION 1..159: note = Description of Unknown: uncultivated organism with predicted taxonomy: Megasphaera stantonii
  REGION 1..159: note = MG15-157 HNH domain
EMGRSFQERRDMMKSMEDNNAENEKRKEELKGYGVAHPNGLDIVKLKLYKEQGGVCAYSLAAMPIEKVLKDPSYAEVDHILPYSRSFDDSYANKVLVLAKENRDKGNRTPMEYMANLPERKHAFITWVKSNVRNPKKRDNLLLEKFDGDKEDAWKERHL

SEQ ID NO: 4720 - protein, 158 aa, unidentified; identical to SEQ ID NO: 4711
  REGION 1..158: note = Description of Unknown: uncultivated organism with predicted taxonomy: Selenomonas ruminantium
  REGION 1..158: note = MG15-158 HNH domain

SEQ ID NO: 4721 - protein, 158 aa, unidentified; identical to SEQ ID NO: 4711
  REGION 1..158: note = Description of Unknown: uncultivated organism with predicted taxonomy: Selenomonas ruminantium
  REGION 1..158: note = MG15-159 HNH domain

SEQ ID NO: 4722 - protein, 159 aa, unidentified; identical to SEQ ID NO: 4719
  REGION 1..159: note = Description of Unknown: uncultivated organism with predicted taxonomy: Megasphaera stantonii
  REGION 1..159: note = MG15-160 HNH domain

SEQ ID NO: 4723 - protein, 160 aa, unidentified; identical to SEQ ID NO: 4600
  REGION 1..160: note = Description of Unknown: uncultivated organism with predicted taxonomy: Selenomonas sp. AE3005
  REGION 1..160: note = MG15-161 HNH domain

SEQ ID NO: 4724 - protein, 160 aa, unidentified
  REGION 1..160: note = Description of Unknown: uncultivated organism with predicted taxonomy: Megasphaera
  REGION 1..160: note = MG15-162 HNH domain
ELAKNFRDRKKMEKGMQENQAKNEKIRQRLMSEFGVLRPKGMDIVKFKLCEEQNGECAYSQKHFDMEKLLRDPSYAEVDHIIPYSRSFDDSYNNKVLVLTKENREKRNRIPMEYLADATERKNRFIHWVKSTIRNSRKRENLLRIDYTETTENEWKRRNL

SEQ ID NO: 4725 - protein, 160 aa, unidentified
  REGION 1..160: note = Description of Unknown: uncultivated organism with predicted taxonomy: Megasphaera stantonii
  REGION 1..160: note = MG15-163 HNH domain
ELARNFRDRKKMEKGMQENQAKNEKIRQRLISEFGVLRPKGMDIVKFKLCEEQNGECAYSQKHFDMEKLLKDPSYAEVDHIIPYSRSFDDSYNNKVLVLTKENREKRNRIPMEYLADAPERKNRFIHWVKSTIWNSRKRENLLRIDYTETTENEWKRRNL

SEQ ID NO: 4726 - protein, 160 aa, unidentified
  REGION 1..160: note = Description of Unknown: uncultivated organism with predicted taxonomy: Megasphaera
  REGION 1..160: note = MG15-164 HNH domain
ELARNFRDRKKMEKGMQENQAKNEKIRQRLISEFGVLRPKGMDIVKFKLCEEQNGECAYSQKHFDMEKLLRDPSYAEVDHIIPYSRSFDDSYNNKVLVLTKENREKRNRIPMEYLADAPERKNRFIHWVKSTIRNSRKRENLLRTDYTATTENEWKRRNL

SEQ ID NO: 4727 - protein, 160 aa, unidentified; identical to SEQ ID NO: 4565
  REGION 1..160: note = Description of Unknown: uncultivated organism with predicted taxonomy: Megasphaera stantonii
  REGION 1..160: note = MG15-165 HNH domain

SEQ ID NO: 4728 - protein, 160 aa, unidentified
  REGION 1..160: note = Description of Unknown: uncultivated organism with predicted taxonomy: Bacteroidales
  REGION 1..160: note = MG16-2 HNH domain
ELKQSREERELTDKNNRNRQKENDSNAKLIEEYGIRASRNRIQKYRMWKESRQTCFYCGQVVDVKDFLRGYDVEVEHIIPKALFFDDSFSNKVCSCRKCNSEKGERTAYDYMSSKGEDELNRYIRTVEDRCKKGEISKTKRERLLTPADKIPTDFINRQL

SEQ ID NO: 4729 - protein, 160 aa, unidentified
  REGION 1..160: note = Description of Unknown: uncultivated organism with predicted taxonomy: Bacteroidales
  REGION 1..160: note = MG16-5 HNH domain
ELKSSKDEREAAFKRNNENERQNKIYENRIREYGIQPSRSRIQKYKMWEESNHLCFYCGKPVNVTDFLAGAEVEIEHIIPQSVLFDDSYSNKVCACRACNQAKGNLTAREFMEKHSKEEYDSYLRRVDDAFNAHRISKTKRDHLLWRKEDIPQDFIDRQL

SEQ ID NO: 4730 - protein, 160 aa, unidentified; identical to SEQ ID NO: 4729
  REGION 1..160: note = Description of Unknown: uncultivated organism with predicted taxonomy: Bacteroidetes
  REGION 1..160: note = MG16-6 HNH domain

SEQ ID NO: 4731 - protein, 160 aa, unidentified
  REGION 1..160: note = Description of Unknown: uncultivated organism with predicted taxonomy: Bacteroides
  REGION 1..160: note = MG16-7 HNH domain
ELKLSQEARATTAKSIRDREKINLEYAGKIREFGIVPSKNKILKYRLWEEAGQRCFYCGQTISAQEFLSGFDSDIEHIIPKSRLFDDSYSNKACSCRKCNSTKNNMTAYDFMKAQGEDKFKDYCDRVANAYKEGKISRTKRDRFMTPAEKIPKDFISRQL

SEQ ID NO: 4732 - protein, 160 aa, unidentified; identical to SEQ ID NO: 4731
  REGION 1..160: note = Description of Unknown: uncultivated organism with predicted taxonomy: Bacteroides
  REGION 1..160: note = MG16-8 HNH domain

SEQ ID NO: 4733 - protein, 160 aa, unidentified; identical to SEQ ID NO: 4731
  REGION 1..160: note = Description of Unknown: uncultivated organism with predicted taxonomy: Bacteroides sp. CAG:770
  REGION 1..160: note = MG16-9 HNH domain

SEQ ID NO: 4734 - protein, 160 aa, unidentified; identical to SEQ ID NO: 4731
  REGION 1..160: note = Description of Unknown: uncultivated organism with predicted taxonomy: Bacteroides
  REGION 1..160: note = MG16-10 HNH domain

SEQ ID NO: 4735 - protein, 160 aa, unidentified; identical to SEQ ID NO: 4731
  REGION 1..160: note = Description of Unknown: uncultivated organism with predicted taxonomy: Bacteroides
  REGION 1..160: note = MG16-11 HNH domain

SEQ ID NO: 4736 - protein, 160 aa, unidentified; identical to SEQ ID NO: 4729
  REGION 1..160: note = Description of Unknown: uncultivated organism with predicted taxonomy: Bacteroidetes
  REGION 1..160: note = MG16-12 HNH domain

SEQ ID NO: 4737 - protein, 160 aa, unidentified; identical to SEQ ID NO: 4731
  REGION 1..160: note = Description of Unknown: uncultivated organism with predicted taxonomy: Bacteroides
  REGION 1..160: note = MG16-13 HNH domain

SEQ ID NO: 4738 - protein, 160 aa, unidentified; identical to SEQ ID NO: 4731
  REGION 1..160: note = Description of Unknown: uncultivated organism with predicted taxonomy: Bacteroides sp. CAG:770
  REGION 1..160: note = MG16-14 HNH domain

SEQ ID NO: 4739 - protein, 160 aa, unidentified
  REGION 1..160: note = Description of Unknown: uncultivated organism with predicted taxonomy: Bacteroides sp. CAG:770
  REGION 1..160: note = MG16-15 HNH domain
ELKLSKEGRAATAKNIRDREKMNNEMAEKIKELGITPSKNKILKYRLWQESGQKCFYCGQPVGAAEFLSGLDVEIEHIVPKALLFDDSFSNKVCACRKCNAEKSNTTAYDYMKSKGENEFNDYLRRVDAAFNEHKISFTKRSRLLTPTDKLPKDFISRQL

SEQ ID NO: 4740 - protein, 160 aa, unidentified
  REGION 1..160: note = Description of Unknown: uncultivated organism with predicted taxonomy: Bacteroides sp. CAG:709
  REGION 1..160: note = MG16-16 HNH domain
ELKLSKEGRAATAKNIRDREKENKEIADKIIELGVTPSKNKILKYRLWQEAGQKCFYCGQPVGATEFLNGLDVEIEHVVPKALLFDDSFSNKVCACRKCNAEKRNSTAYDYMKSKGENAFNDYLRRVDTAFSEHKISFTKRSRLLTPADKIPKDFISRQL

SEQ ID NO: 4741 - protein, 160 aa, unidentified
  REGION 1..160: note = Description of Unknown: uncultivated organism with predicted taxonomy: Bacteroides sp. CAG:770
  REGION 1..160: note = MG16-17 HNH domain
ELKLSKEGRAATAKNIRDREKMNNEMAEKIKELGITPSKNKILKYRLWQESGQKCFYCGQPVGAAEFLSGLDVEIEHIVPKALLFDDSFSNKVCACRKCNAEKSNTTAYDYMKSKGENEFNDYLRRVDAAFNEHKISFTKRSRLLTPADKLPKDFISRQL

SEQ ID NO: 4742 - protein, 160 aa, unidentified
  REGION 1..160: note = Description of Unknown: uncultivated organism with predicted taxonomy: Bacteroides sp. CAG:770
  REGION 1..160: note = MG16-18 HNH domain
ELKLSKEGRESAAKNIRAREKANEEIARRIEELGLVPSKNKILKYRLWEESGKRCFYCGQPVSAAEFLNGLDVEIEHVIPKSLLFDDSFSNKVCACRKCNAEKDNATAFDFMKGRGENAFEDYLKRVETAFKENRISQTKKNRLLTPADKIPKDFISRQL

SEQ ID NO: 4743 - protein, 160 aa, unidentified
  REGION 1..160: note = Description of Unknown: uncultivated organism with predicted taxonomy: Bacteroides sp. CAG:770
  REGION 1..160: note = MG16-19 HNH domain
ELKLSKAGRESAANNIRTRKKVNEEIAKRIEELGLVPSKNKILKYRLWEESGKRCFYCGQPVSATEFLNGLDVEIEHVVPKSLLFDDSFSNKVCACRKCNAEKGNATAFDFMKGRGENAFEDYLKRVETAFKENTISQTKRNRLLTPADKIPKDFIARQL

SEQ ID NO: 4744 - protein, 160 aa, unidentified
  REGION 1..160: note = Description of Unknown: uncultivated organism with predicted taxonomy: Bacteroides sp. CAG:770
  REGION 1..160: note = MG16-20 HNH domain
ELKLSKEGRAATAKNIRDREKMNNEMAEKIKELGITPSKNKILKYRLWQESGQKCFYCGQPVGAAEFLSGLDVEIEHIVPKALLFDDSFSNKVCACRKCNAEKSNTTAYDYMKSKGENEFNDYLRRVDAAFNEHKISFTKRSRLLTPANKLPKDFISRQL

SEQ ID NO: 4745 - protein, 160 aa, unidentified
  REGION 1..160: note = Description of Unknown: uncultivated organism with predicted taxonomy: Bacteroides sp. CAG:770
  REGION 1..160: note = MG16-21 HNH domain
ELKLSKAGRESAAKNVRTREKANEEIAKRIEELGLVPSKNKILKYRLWEESGKRCFYCGQPVSATEFLNGLDVEIEHVVPKSLLFDDSFSNKVCACRKCNAEKGNATAFDFMKGRGENAFEDYLKRVETAFKENKISQTKRNRLLTPADKIPKDFISRQL

SEQ ID NO: 4746 - protein, 160 aa, unidentified
  REGION 1..160: note = Description of Unknown: uncultivated organism with predicted taxonomy: Bacteroides sp. CAG:770
  REGION 1..160: note = MG16-22 HNH domain
ELKLSKSGRESAAKNIRTREKANEEIAKRIEELGLVPSKNKILKYRLWEESGKRCFYCGQPVSATEFLNGLDVEIEHVVPKSLLFDDSFSNKVCACRKCNAEKGNATAFDFMKGRGENAFEDYLKRVETAFKENKISQTKRNRLLTPADKIPKDFIARQL

SEQ ID NO: 4747 - protein, 160 aa, unidentified
  REGION 1..160: note = Description of Unknown: uncultivated organism with predicted taxonomy: Bacteroidales
  REGION 1..160: note = MG16-23 HNH domain
ELKLSKEGRAATAKNIRDREKMNNEMAEKIKELGITPSKNKILKYRLWQESGQKCFYCGQPVGAAEFLSGLDVEIEHIVPKALLFDDSFSNKVCACRKCNAEKSNTTAYDYMKSKGENEFNDYLRRVDAAFNEHKISFTKRSRLLSPADKLPKDFISRQL

SEQ ID NO: 4748 - protein, 160 aa, unidentified; identical to SEQ ID NO: 4741
  REGION 1..160: note = Description of Unknown: uncultivated organism with predicted taxonomy: Bacteroides sp. CAG:770
  REGION 1..160: note = MG16-24 HNH domain

SEQ ID NO: 4749 - protein, 160 aa, unidentified
  REGION 1..160: note = Description of Unknown: uncultivated organism with predicted taxonomy: Bacteroides sp. CAG:770
  REGION 1..160: note = MG16-25 HNH domain
ELKLSKEGRESAAKNIRAREKANEEIARRIEELGLVPSKNKILKYRLWEESVKRCFYCGQPVSAAEFLNGLDVEIEHVIPKSLLFDDSFSNKVCACRKCNAEKDNATAFDFMKGRGENAFEDYLKRVETAFKENRISQTKKNRLLTPADKIPKDFISRQL

SEQ ID NO: 4750 - protein, 160 aa, unidentified; identical to SEQ ID NO: 4741
  REGION 1..160: note = Description of Unknown: uncultivated organism with predicted taxonomy: Bacteroides
  REGION 1..160: note = MG16-26 HNH domain

SEQ ID NO: 4751 - protein, 160 aa, unidentified
  REGION 1..160: note = Description of Unknown: uncultivated organism with predicted taxonomy: Bacteroides sp. CAG:770
  REGION 1..160: note = MG16-27 HNH domain
ELKLSKAGRESAAKNIRTREKANEEIAKRIEELGLVPSKNKILKYRLWEESGKRCFYCGQPVSATEFLNGLDVEIEHIVPKSLLFDDSFSNKVCACRKCNAEKGNATAFDYMKGRGENAFEDYLKRVEAAFKENKISQTKRNRLLTPADKIPKDFISRQL

SEQ ID NO: 4752 - protein, 160 aa, unidentified; identical to SEQ ID NO: 4741
  REGION 1..160: note = Description of Unknown: uncultivated organism with predicted taxonomy: Bacteroides sp. CAG:545
  REGION 1..160: note = MG16-28 HNH domain

SEQ ID NO: 4753 - protein, 160 aa, unidentified
  REGION 1..160: note = Description of Unknown: uncultivated organism with predicted taxonomy: Bacteroides sp. CAG:709
  REGION 1..160: note = MG16-29 HNH domain
ELKLSKEGRAATAKNIRDREKENKEIAEKIIELGVTPSKNKILKYRLWQEAGQKCFYCGQPVGATEFLNGLDVEIEHVVPKALLFDDSFSNKVCACRKCNAEKRKSTAYDYMKSKGENAFNDYLRRVDTAFSEHKISFTKRSRLLTPADKIPKDFISRQL

SEQ ID NO: 4754 - protein, 160 aa, unidentified
  REGION 1..160: note = Description of Unknown: uncultivated organism with predicted taxonomy: Bacteroides sp. CAG:709
  REGION 1..160: note = MG16-30 HNH domain
ELKLSKEGRAATAKNIRDREKENKEIAEKIIELGVTPSKNKILKYRLWQEAGQKCFYCGQPVGATEFLNGLDVEIEHVVPKALLFDDSFSNKVCACRKCNAEKRNSTAYDYMKSKGENAFNDYLRRVDTAFSEHKISFTKRSRLLTPADKIPKDFISRQL

SEQ ID NO: 4755 - protein, 160 aa, unidentified; identical to SEQ ID NO: 4754
  REGION 1..160: note = Description of Unknown: uncultivated organism with predicted taxonomy: Bacteroides sp. CAG:709
  REGION 1..160: note = MG16-31 HNH domain

SEQ ID NO: 4756 - protein, 160 aa, unidentified
  REGION 1..160: note = Description of Unknown: uncultivated organism with predicted taxonomy: Alistipes sp. CAG:514
  REGION 1..160: note = MG16-32 HNH domain
ELKLSKEGRAATAKNIRDREKQNNEIAEKIKELGITPSKNKILKYRLWQESGQKCFYCGQPVGAAEFLNGLDVEIEHIVPKALLFDDSFSNKVCACRRCNAEKSNLTAYDYMKSKGENEFNDYLRRVDAAFNDHKISFTKRSRLLTPADKLPKDFILRQL

SEQ ID NO: 4757 - protein, 160 aa, unidentified; identical to SEQ ID NO: 4756
  REGION 1..160: note = Description of Unknown: uncultivated organism with predicted taxonomy: Alistipes sp. CAG:514
  REGION 1..160: note = MG16-33 HNH domain

SEQ ID NO: 4758 - protein, 160 aa, unidentified; identical to SEQ ID NO: 4741
  REGION 1..160: note = Description of Unknown: uncultivated organism with predicted taxonomy: Bacteroides sp. CAG:545
  REGION 1..160: note = MG16-34 HNH domain

SEQ ID NO: 4759 - protein, 160 aa, unidentified; identical to SEQ ID NO: 4742
  REGION 1..160: note = Description of Unknown: uncultivated organism with predicted taxonomy: Bacteroides sp. CAG:770
  REGION 1..160: note = MG16-35 HNH domain

SEQ ID NO: 4760 - protein, 160 aa, unidentified; identical to SEQ ID NO: 4741
  REGION 1..160: note = Description of Unknown: uncultivated organism with predicted taxonomy: Bacteroides
  REGION 1..160: note = MG16-36 HNH domain

SEQ ID NO: 4761 - protein, 160 aa, unidentified; identical to SEQ ID NO: 4741
  REGION 1..160: note = Description of Unknown: uncultivated organism with predicted taxonomy: Bacteroides sp. CAG:545
  REGION 1..160: note = MG16-37 HNH domain

SEQ ID NO: 4762 - protein, 160 aa, unidentified; identical to SEQ ID NO: 4741
  REGION 1..160: note = Description of Unknown: uncultivated organism with predicted taxonomy: Bacteroides
  REGION 1..160: note = MG16-38 HNH domain

SEQ ID NO: 4763 - protein, 160 aa, unidentified
  REGION 1..160: note = Description of Unknown: uncultivated organism with predicted taxonomy: Bacteroides sp. CAG:770
  REGION 1..160: note = MG16-39 HNH domain
ELKLSKAGRESAAKNVRTREKANEEIAKRIEELGLVPSKNKILKYRLWEESGKRCFYCGQPVSATEFLNGLDVEIEHVVPKSLLFDDSFSNKVCACRKCNAEKGNATAFDFMKGRGENAFEDYLKRVETAFKENKISQTKRNRLLTPADKIPKDFIARQL

SEQ ID NO: 4764 - protein, 160 aa, unidentified; identical to SEQ ID NO: 4754
  REGION 1..160: note = Description of Unknown: uncultivated organism with predicted taxonomy: Bacteroides sp. CAG:770
  REGION 1..160: note = MG16-40 HNH domain

SEQ ID NO: 4765 - protein, 160 aa, unidentified
  REGION 1..160: note = Description of Unknown: uncultivated organism with predicted taxonomy: Bacteroides sp. CAG:770
  REGION 1..160: note = MG16-42 HNH domain
ELKLSKEGRESAAKNIRAREKANEEIAKRIEELGLLPSKNKILKYRLWEESGKRCFYCGQPVSATEFLNGLDVEIEHVVPKSLLFDDSFSNKVCACRKCNAEKGNATAFDFMNGRGENAFEDYLKRVETAFKENKISQTKRNRLLTPADKIPKDFISRQL

SEQ ID NO: 4766 - protein, 160 aa, unidentified; identical to SEQ ID NO: 4765
  REGION 1..160: note = Description of Unknown: uncultivated organism with predicted taxonomy: Bacteroides sp. CAG:770
  REGION 1..160: note = MG16-43 HNH domain

SEQ ID NO: 4767 - protein, 160 aa, unidentified
  REGION 1..160: note = Description of Unknown: uncultivated organism with predicted taxonomy: Bacteroides sp. CAG:770
  REGION 1..160: note = MG16-44 HNH domain
ELKLSKSGRESAAKNIRTREKANEEIAKRIEELGLVPSKNKILKYRLWEESGKRCFYCGQPVSATEFLNGLDVEIEHVVPKSLLFDNSFSNKVCACRKCNAEKGNATAFDFMKGRGENAFEDYLKRVETAFKENKISQTKRNRLLTPADKIPKDFISRQL

SEQ ID NO: 4768 - protein, 160 aa, unidentified; identical to SEQ ID NO: 4742
  REGION 1..160: note = Description of Unknown: uncultivated organism with predicted taxonomy: Bacteroides sp. CAG:770
  REGION 1..160: note = MG16-45 HNH domain

SEQ ID NO: 4769 - protein, 160 aa, unidentified
  REGION 1..160: note = Description of Unknown: uncultivated organism with predicted taxonomy: Bacteroides sp. CAG:770
  REGION 1..160: note = MG16-46 HNH domain
ELKLSKEGRAATAKNLRDREKMNNEMAEKIKELGITPSKNKILKYRLWQESGQKCFYCGQPVGAAEFLSGLDVEIEHIVPKALLFDDSFSNKVCACRKCNAEKSNTTAYDYMKSKGENEFNDYLRRVDAAFNEHKISFTKRSRLLTPADKLPKDFISRQL

SEQ ID NO: 4770 - protein, 160 aa, unidentified
  REGION 1..160: note = Description of Unknown: uncultivated organism with predicted taxonomy: Bacteroides sp. CAG:709
  REGION 1..160: note = MG16-47 HNH domain
ELKLSKEGRAATAKNIRDREKENKEIAEKIIELGVTPSKNKILKYRLWQEAGQKCFYCGQPVGATEFLNGLDVEIEHVVPKALLFDDSFSNKVCACRKCNAEKRNSTAYDYMKSKGENAFNDYLRRVDTAFSEHRISFTKRSRLLTPADKIPKDFISRQL

SEQ ID NO: 4771 - protein, 160 aa, unidentified
  REGION 1..160: note = Description of Unknown: uncultivated organism with predicted taxonomy: Bacteroides sp. CAG:770
  REGION 1..160: note = MG16-48 HNH domain
ELKLSKAGRESAAKNIRTREKANEEIAKRIEELGLVPSKNKILKYRLWEESGKRCFYCGQPVSATEFLNGLDVEIEHVVPKSLLFDDSFSNKVCACRKCNAEKGNATAFDFMKGRGENAFEDYLKRVETAFKENKISQTKRNRLLTPADKIPKDFISRQL

SEQ ID NO: 4772 - protein, 160 aa, unidentified; identical to SEQ ID NO: 4771
  REGION 1..160: note = Description of Unknown: uncultivated organism with predicted taxonomy: Bacteroides sp. CAG:770
  REGION 1..160: note = MG16-50 HNH domain

SEQ ID NO: 4773 - protein, 160 aa, unidentified; identical to SEQ ID NO: 4771
  REGION 1..160: note = Description of Unknown: uncultivated organism with predicted taxonomy: Bacteroides sp. CAG:770
  REGION 1..160: note = MG16-51 HNH domain

SEQ ID NO: 4774 - protein, 160 aa, unidentified; identical to SEQ ID NO: 4763
  REGION 1..160: note = Description of Unknown: uncultivated organism with predicted taxonomy: Bacteroides sp. CAG:770
  REGION 1..160: note = MG16-52 HNH domain

SEQ ID NO: 4775 - protein, 160 aa, unidentified; identical to SEQ ID NO: 4754
  REGION 1..160: note = Description of Unknown: uncultivated organism with predicted taxonomy: Bacteroides sp. CAG:709
  REGION 1..160: note = MG16-53 HNH domain

SEQ ID NO: 4776 - protein, 160 aa, unidentified; identical to SEQ ID NO: 4754
  REGION 1..160: note = Description of Unknown: uncultivated organism with predicted taxonomy: Bacteroides sp. CAG:709
  REGION 1..160: note = MG16-54 HNH domain

SEQ ID NO: 4777 - protein, 160 aa, unidentified
  REGION 1..160: note = Description of Unknown: uncultivated organism with predicted taxonomy: Bacteroides sp. CAG:770
  REGION 1..160: note = MG16-55 HNH domain
ELKLSKEGRESAAKNISDRKKANEEIARRIEELGLVPSKNKILKYRLWEESGKRCFYCGQPVSATEFLNGLDVEIEHVIPKSLLFDDSFSNKVCACRKCNAEKGNATAFDFMKGRGENAFEDYLKRVETAFKENRISQTKRSRLLTPADKIPKDFISRQL

SEQ ID NO: 4778 - protein, 160 aa, unidentified
  REGION 1..160: note = Description of Unknown: uncultivated organism with predicted taxonomy: Bacteroides sp. CAG:545
  REGION 1..160: note = MG16-56 HNH domain
KLKLSKEGRAATAKNIRDREKMNNEMAEKIKELGITPSKNKILKYRLWQESGQKCFYCGQPVGAAEFLSGLDVEIEHIVPKALLFDDSFSNKVCACRKCNAEKSNTTAYDYMKSKGENEFNDYLRRVDAAFNEHKISFTKRSRLLTPADKLPKDFISRQL

SEQ ID NO: 4779 - protein, 160 aa, unidentified; identical to SEQ ID NO: 4743
  REGION 1..160: note = Description of Unknown: uncultivated organism with predicted taxonomy: Bacteroides sp. CAG:770
  REGION 1..160: note = MG16-57 HNH domain

SEQ ID NO: 4780 - protein, 160 aa, unidentified
  REGION 1..160: note = Description of Unknown: uncultivated organism with predicted taxonomy: Bacteroides sp. CAG:770
  REGION 1..160: note = MG16-58 HNH domain
ELKLSKAGRESAAKNIRTREKANEEIAKRIEELDLVPSKNKILKYRLWEESGKRCFYCGQPVSATEFLNGLDVEIEHIVPKSLLFDDSFSNKVCACRKCNAEKGNATAFDFMKGRGENAFEDYLKRVETAFKENKISQTKRNRLLTPADKIPKDFIARQL

SEQ ID NO: 4781 - protein, 160 aa, unidentified
  REGION 1..160: note = Description of Unknown: uncultivated organism with predicted taxonomy: Bacteroides sp. CAG:770
  REGION 1..160: note = MG16-59 HNH domain
ELKLSKEGRAATAKNIRDREKMNNEMAEKIKELGITPSKNKILKYRLWQESGQKCFYCGQPVGAAEFLSGLDVEIEHIVPKALLFDDSFSNKVCACRKCNAEKSNNTAYDYMKSKGENEFNDYLRRVDAAFNEHKISFTKRSRLLTPADKLPKDFISRQL

SEQ ID NO: 4782 - protein, 160 aa, unidentified; identical to SEQ ID NO: 4741
  REGION 1..160: note = Description of Unknown: uncultivated organism with predicted taxonomy: Bacteroides sp. CAG:770
  REGION 1..160: note = MG16-60 HNH domain

SEQ ID NO: 4783 - protein, 160 aa, unidentified
  REGION 1..160: note = Description of Unknown: uncultivated organism with predicted taxonomy: Bacteroides sp. CAG:709
  REGION 1..160: note = MG16-61 HNH domain
ELKLSKEGRAATAKNIRDREKENKEIAEKIIELGVTPSKNKILKYRLWQEAGQKCFYCGQPVGATEFLNGLEVEIEHVVPKALLFDDSFSNKVCACRKCNAEKRNSTAYDYMKSKGENAFNDYLRRVDTAFSEHKISFTKRSRLLTPADKIPKDFISRQL

SEQ ID NO: 4784 - protein, 160 aa, unidentified; identical to SEQ ID NO: 4741
  REGION 1..160: note = Description of Unknown: uncultivated organism with predicted taxonomy: Bacteroides sp. CAG:770
  REGION 1..160: note = MG16-62 HNH domain

SEQ ID NO: 4785 - protein, 160 aa, unidentified; identical to SEQ ID NO: 4741
  REGION 1..160: note = Description of Unknown: uncultivated organism with predicted taxonomy: Bacteroides sp. CAG:770
  REGION 1..160: note = MG16-63 HNH domain

SEQ ID NO: 4786 - protein, 160 aa, unidentified; identical to SEQ ID NO: 4756
  REGION 1..160: note = Description of Unknown: uncultivated organism with predicted taxonomy: Alistipes sp. CAG:514
  REGION 1..160: note = MG16-64 HNH domain

SEQ ID NO: 4787 - protein, 160 aa, unidentified
  REGION 1..160: note = Description of Unknown: uncultivated organism with predicted taxonomy: Bacteroides sp. CAG:770
  REGION 1..160: note = MG16-65 HNH domain
ELKLSKEGRESAAKNISDRKKANEEIARRIEELGLVPSKNKILKYRLWEESGKRCFYCGQPVSAAEFLNGLDVEIEHVIPKSLLFDDSFSNKVCACRKCNAEKDNATAFDFMKGRGENAFEDYLKRVETAFKENKISQTKRNRLLTPADKIPKDFISRQL

SEQ ID NO: 4788 - protein, 160 aa, unidentified
  REGION 1..160: note = Description of Unknown: uncultivated organism with predicted taxonomy: Bacteroides sp. CAG:770
  REGION 1..160: note = MG16-66 HNH domain
ELKLSKEGRAATAKNIRDREKMNNEMAEKIKELGITPSKNKILKYRLWQESGQKCFYCGQPVGAAEFLSGLDVEIEHIVPKALLFDDSFSNKVCACRKCNAEKSNTTAYDYMKSKGENEFNDYLRRVDAAFNAHKISFTKRSRLLTPADKLPKDFISRQL

SEQ ID NO: 4789 - protein, 160 aa, unidentified; identical to SEQ ID NO: 4741
  REGION 1..160: note = Description of Unknown: uncultivated organism with predicted taxonomy: Bacteroides sp. CAG:545
  REGION 1..160: note = MG16-67 HNH domain

SEQ ID NO: 4790 - protein, 160 aa, unidentified; identical to SEQ ID NO: 4744
  REGION 1..160: note = Description of Unknown: uncultivated organism with predicted taxonomy: Bacteroides sp. CAG:770
  REGION 1..160: note = MG16-68 HNH domain

SEQ ID NO: 4791 - protein, 160 aa, unidentified; identical to SEQ ID NO: 4754
  REGION 1..160: note = Description of Unknown: uncultivated organism with predicted taxonomy: Bacteroides sp. CAG:709
  REGION 1..160: note = MG16-69 HNH domain

SEQ ID NO: 4792 - protein, 160 aa, unidentified; identical to SEQ ID NO: 4741
  REGION 1..160: note = Description of Unknown: uncultivated organism with predicted taxonomy: Bacteroides sp. CAG:770
  REGION 1..160: note = MG16-70 HNH domain

SEQ ID NO: 4793 - protein, 160 aa, unidentified; identical to SEQ ID NO: 4741
  REGION 1..160: note = Description of Unknown: uncultivated organism with predicted taxonomy: Bacteroides sp. CAG:545
  REGION 1..160: note = MG16-72 HNH domain

SEQ ID NO: 4794 - protein, 160 aa, unidentified; identical to SEQ ID NO: 4741
  REGION 1..160: note = Description of Unknown: uncultivated organism with predicted taxonomy: Bacteroides sp. CAG:545
  REGION 1..160: note = MG16-73 HNH domain

SEQ ID NO: 4795 - protein, 160 aa, unidentified
  REGION 1..160: note = Description of Unknown: uncultivated organism with predicted taxonomy: Bacteroides sp. CAG:770
  REGION 1..160: note = MG16-74 HNH domain
ELKLSKAGRESAAKNIRTREKANEEIAKRIEELGLVPSKNKILKYRLWEESGKRCFYCGQPVSATEFLNGLDVEIEHIVPKSLLFDDSFSNKVCACRKCNAEKDNATAFDFMKGRGENAFEDYLKRVETAFKENKISQTKRNRLLTPADKIPKDFISRQL

SEQ ID NO: 4796 - protein, 160 aa, unidentified; identical to SEQ ID NO: 4754
  REGION 1..160: note = Description of Unknown: uncultivated organism with predicted taxonomy: Bacteroides sp. CAG:709
  REGION 1..160: note = MG16-75 HNH domain

SEQ ID NO: 4797 - protein, 160 aa, unidentified; identical to SEQ ID NO: 4754
  REGION 1..160: note = Description of Unknown: uncultivated organism with predicted taxonomy: Bacteroides
  REGION 1..160: note = MG16-76 HNH domain

SEQ ID NO: 4798 - protein, 160 aa, unidentified
  REGION 1..160: note = Description of Unknown: uncultivated organism with predicted taxonomy: Bacteroides sp. CAG:770
  REGION 1..160: note = MG16-77 HNH domain
ELKLSKAGRESAAKNIRTREKANEEIAKRIEELGLVPSKNKILKYRLWEESGKRCFYCGQPVSAAEFLNGLDVEIEHVVPKSLLFDDSFSNKVCACRKCNAEKGNATAFDFMKGRGENAFEDYLKRVETAFKENKISQTKRNRLLTPADKIPKDFIARQL

SEQ ID NO: 4799 - protein, 160 aa, unidentified; identical to SEQ ID NO: 4747
  REGION 1..160: note = Description of Unknown: uncultivated organism with predicted taxonomy: Bacteroides
  REGION 1..160: note = MG16-78 HNH domain

SEQ ID NO: 4800 - protein, 160 aa, unidentified
  REGION 1..160: note = Description of Unknown: uncultivated organism with predicted taxonomy: Bacteroides sp. CAG:770
  REGION 1..160: note = MG16-79 HNH domain
ELKLSKEGRAATAKNIRDREKMNNEMAEKIKELGITPSKNKILKYRLWQESGQKCFYCGQPVGAAEFLSGLDVEIEHIVPKALLFDDSFSNKVCACRKCNAEKSNTTAYDYMKSKGENEFNDYLRRVDAAFNEHRISFIKRSRLLTPADKLPKDFISRQL

SEQ ID NO: 4801 - protein, 160 aa, unidentified; identical to SEQ ID NO: 4769
  REGION 1..160: note = Description of Unknown: uncultivated organism with predicted taxonomy: Bacteroides sp. CAG:545
  REGION 1..160: note = MG16-80 HNH domain

SEQ ID NO: 4802 - protein, 160 aa, unidentified; identical to SEQ ID NO: 4754
  REGION 1..160: note = Description of Unknown: uncultivated organism with predicted taxonomy: Bacteroides
  REGION 1..160: note = MG16-81 HNH domain

SEQ ID NO: 4803 - protein, 160 aa, unidentified
  REGION 1..160: note = Description of Unknown: uncultivated organism with predicted taxonomy: Bacteroides sp. CAG:770
  REGION 1..160: note = MG16-82 HNH domain
ELKLSKEGRAATAKNIRDREKMNNEMAEKIKELGITPSKNKLLKYRLWQESGQKCFYCGQPVGAAEFLSGLDVEIEHIVPKALLFDDSFSNKVCACRKCNAEKSNTTAYDYMKSKGENEFNDYLRRVDAAFNEHKISFTKRSRLLTPANKLPKDFISRQL

SEQ ID NO: 4804 - protein, 160 aa, unidentified; identical to SEQ ID NO: 4741
  REGION 1..160: note = Description of Unknown: uncultivated organism with predicted taxonomy: Bacteroides sp. CAG:545
  REGION 1..160: note = MG16-83 HNH domain

SEQ ID NO: 4805 - protein, 160 aa, unidentified
  REGION 1..160: note = Description of Unknown: uncultivated organism with predicted taxonomy: Bacteroidetes
  REGION 1..160: note = MG16-84 HNH domain
ELKESKDERESAFKRNNENERKNKEYEARIREYGIRPSRSRIQKYKMWEESQKKCFYCGKTIDVVEFLNGVDAEIEHIIPQSVLFDDSFSNKVCSCRDCNHTKGNLTAREFMEQHSAADYEAYLRRVDEAFDEHRISKTKRDHLLWRKEDIPQDFIDRQL

SEQ ID NO: 4806 - protein, 160 aa, unidentified; identical to SEQ ID NO: 4741
  REGION 1..160: note = Description of Unknown: uncultivated organism with predicted taxonomy: Bacteroides
  REGION 1..160: note = MG16-85 HNH domain

SEQ ID NO: 4807 - protein, 160 aa, unidentified; identical to SEQ ID NO: 4744
  REGION 1..160: note = Description of Unknown: uncultivated organism with predicted taxonomy: Bacteroides sp. CAG:545
  REGION 1..160: note = MG16-86 HNH domain

SEQ ID NO: 4808 - protein, 160 aa, unidentified; identical to SEQ ID NO: 4744
  REGION 1..160: note = Description of Unknown: uncultivated organism with predicted taxonomy: Bacteroides
  REGION 1..160: note = MG16-87 HNH domain

SEQ ID NO: 4809 - protein, 160 aa, unidentified; identical to SEQ ID NO: 4740
  REGION 1..160: note = Description of Unknown: uncultivated organism with predicted taxonomy: Bacteroides
  REGION 1..160: note = MG16-88 HNH domain

SEQ ID NO: 4810 - protein, 160 aa, unidentified; identical to SEQ ID NO: 4753
  REGION 1..160: note = Description of Unknown: uncultivated organism with predicted taxonomy: Bacteroides sp. CAG:709
  REGION 1..160: note = MG16-89 HNH domain

SEQ ID NO: 4811 - protein, 160 aa, unidentified; identical to SEQ ID NO: 4780
  REGION 1..160: note = Description of Unknown: uncultivated organism with predicted taxonomy: Bacteroides sp. CAG:770
  REGION 1..160: note = MG16-90 HNH domain

SEQ ID NO: 4812 - protein, 160 aa, unidentified; identical to SEQ ID NO: 4780
  REGION 1..160: note = Description of Unknown: uncultivated organism with predicted taxonomy: Bacteroides sp. CAG:770
  REGION 1..160: note = MG16-91 HNH domain

SEQ ID NO: 4813 - protein, 160 aa, unidentified; identical to SEQ ID NO: 4756
  REGION 1..160: note = Description of Unknown: uncultivated organism with predicted taxonomy: Alistipes sp. CAG:514
  REGION 1..160: note = MG16-92 HNH domain

SEQ ID NO: 4814 - protein, 160 aa, unidentified; identical to SEQ ID NO: 4756
  REGION 1..160: note = Description of Unknown: uncultivated organism with predicted taxonomy: Alistipes sp. CAG:514
  REGION 1..160: note = MG16-93 HNH domain

SEQ ID NO: 4815 - protein, 160 aa, unidentified; identical to SEQ ID NO: 4741
  REGION 1..160: note = Description of Unknown: uncultivated organism with predicted taxonomy: Bacteroides sp. CAG:545
  REGION 1..160: note = MG16-94 HNH domain

SEQ ID NO: 4816 - protein, 160 aa, unidentified; identical to SEQ ID NO: 4754
  REGION 1..160: note = Description of Unknown: uncultivated organism with predicted taxonomy: Bacteroides sp. CAG:709
  REGION 1..160: note = MG16-95 HNH domain

SEQ ID NO: 4817 - protein, 160 aa, unidentified; identical to SEQ ID NO: 4741
  REGION 1..160: note = Description of Unknown: uncultivated organism with predicted taxonomy: Bacteroides
  REGION 1..160: note = MG16-96 HNH domain

SEQ ID NO: 4818 - protein, 160 aa, unidentified
  REGION 1..160: note = Description of Unknown: uncultivated organism with predicted taxonomy: Bacteroides
  REGION 1..160: note = MG16-97 HNH domain
ELKLSKEGRAATAKNIRNREKMNNEMAEKIKELGITPSKNKILKYRLWQESGQKCFYCGQPVGAAEFLSGLDVEIEHIVPKALLFDDSFSNKVCACRKCNAEKSNTTAYDYMKSKGENEFNDYLRRVDAAFNEHKISFTKRSRLLTPADKLPKDFISRQL

SEQ ID NO: 4819 - protein, 160 aa, unidentified
  REGION 1..160: note = Description of Unknown: uncultivated organism with predicted taxonomy: Bacteroides sp. CAG:770
  REGION 1..160: note = MG16-98 HNH domain
ELKLSKEGRESAAKNIRAREKANEEIAKRIEELGLVPSKNKILKYRLWEESGKRCFYCGQPVSATEFLNGLDVEIEHVVPKSLLFDDSFSNKVCACRKCNAEKGNATAFDFMKGRGENAFEDYLKRVETAFKENKISQTKRNRLLTPADKIPKDFIARQL

SEQ ID NO: 4820 - protein, 160 aa, unidentified
  REGION 1..160: note = Description of Unknown: uncultivated organism with predicted taxonomy: Bacteroides sp. CAG:709
  REGION 1..160: note = MG16-99 HNH domain
ELKLSKEGRAATAKNIRDREKENKEIAEKIIELGVTPSKNKILKYRLWQEAGQKCFYCGQPVGATEFLNGLDVEIEHVVPKALLFDDSFSNKVCACRKCNAEKRDSTAYDYMKSKGENAFNDYLRRVDTAFSEHKISFTKRSRLLTPADKIPKDFISRQL

SEQ ID NO: 4821 - protein, 160 aa, unidentified
  REGION 1..160: note = Description of Unknown: uncultivated organism with predicted taxonomy: Bacteroides sp. CAG:709
  REGION 1..160: note = MG16-100 HNH domain
ELKLSKEGRAATAKNIRDREKENKEIAEKIIELDVTPSKNKILKYRLWQEAGQKCFYCGQPVGATEFLNGLDVEIEHVVPKALLFDDSFSNKVCACRKCNAEKRNSTAYDYMKSKGENAFNDYLRRVDTAFSEHKISFTKRSRLLTPADKIPKDFISRQL

SEQ ID NO: 4822 - protein, 160 aa, unidentified; identical to SEQ ID NO: 4741
  REGION 1..160: note = Description of Unknown: uncultivated organism with predicted taxonomy: Bacteroides sp. CAG:545
  REGION 1..160: note = MG16-101 HNH domain

SEQ ID NO: 4823 - protein, 160 aa, unidentified
  REGION 1..160: note = Description of Unknown: uncultivated organism with predicted taxonomy: Bacteroides sp. CAG:770
  REGION 1..160: note = MG16-102 HNH domain
ELKLSKAGRESAANNIRTRKKANEEIAKRIEELGLVPSKNKILKYRLWEESGKRCFYCGQPVSATEFLNGLDVEIEHVVPKSLLFDDSFSNKVCACRKCNAEKGNATAFDFMKGRGENAFEDYLKRVETAFKENKISQTKRNRLLTPADKIPKDFISRQL

SEQ ID NO: 4824 - protein, 160 aa, unidentified; identical to SEQ ID NO: 4767
  REGION 1..160: note = Description of Unknown: uncultivated organism with predicted taxonomy: Bacteroides sp. CAG:770
  REGION 1..160: note = MG16-103 HNH domain

SEQ ID NO: 4825 - protein, 160 aa, unidentified; identical to SEQ ID NO: 4754
  REGION 1..160: note = Description of Unknown: uncultivated organism with predicted taxonomy: Bacteroides
  REGION 1..160: note = MG16-104 HNH domain

SEQ ID NO: 4826 - protein, 160 aa, unidentified
  REGION 1..160: note = Description of Unknown: uncultivated organism with predicted taxonomy: Bacteroides sp. CAG:770
  REGION 1..160: note = MG16-105 HNH domain
ELKLSKAGRESAANNIRTRKKVNEEIAKRIEELGLVPSKNKILKYRLWEESGKRCFYCGQPVSATEFLNGLDVEIEHVVPKSLLFDDSFSNKVCACRKCNAEKGNATAFDFMKGRGENAFEDYLKRVETAFKENRISQTKRNRLLTPADKIPKDFIARQL

SEQ ID NO: 4827 - protein, 160 aa, unidentified; identical to SEQ ID NO: 4741
  REGION 1..160: note = Description of Unknown: uncultivated organism with predicted taxonomy: Bacteroides sp. CAG:545
  REGION 1..160: note = MG16-106 HNH domain

SEQ ID NO: 4828 - protein, 160 aa, unidentified; identical to SEQ ID NO: 4741
  REGION 1..160: note = Description of Unknown: uncultivated organism with predicted taxonomy: Bacteroides sp. CAG:545
  REGION 1..160: note = MG16-107 HNH domain

SEQ ID NO: 4829 - protein, 160 aa, unidentified; identical to SEQ ID NO: 4746
  REGION 1..160: note = Description of Unknown: uncultivated organism with predicted taxonomy: Bacteroides sp. CAG:770
  REGION 1..160: note = MG16-108 HNH domain

SEQ ID NO: 4830 - protein, 160 aa, unidentified; identical to SEQ ID NO: 4754
  REGION 1..160: note = Description of Unknown: uncultivated organism with predicted taxonomy: Bacteroides sp. CAG:709
  REGION 1..160: note = MG16-109 HNH domain

SEQ ID NO: 4831 - protein, 160 aa, unidentified; identical to SEQ ID NO: 4754
  REGION 1..160: note = Description of Unknown: uncultivated organism with predicted taxonomy: Bacteroides sp. CAG:709
  REGION 1..160: note = MG16-110 HNH domain

SEQ ID NO: 4832 - protein, 160 aa, unidentified; identical to SEQ ID NO: 4741
  REGION 1..160: note = Description of Unknown: uncultivated organism with predicted taxonomy: Bacteroides sp. CAG:770
  REGION 1..160: note = MG16-113 HNH domain

SEQ ID NO: 4833 - protein, 160 aa, unidentified; identical to SEQ ID NO: 4741
  REGION 1..160: note = Description of Unknown: uncultivated organism with predicted taxonomy: Bacteroides sp. CAG:545
  REGION 1..160: note = MG16-114 HNH domain

SEQ ID NO: 4834 - protein, 160 aa, unidentified; identical to SEQ ID NO: 4747
  REGION 1..160: note = Description of Unknown: uncultivated organism with predicted taxonomy: Bacteroides sp. CAG:770
  REGION 1..160: note = MG16-115 HNH domain

SEQ ID NO: 4835 - protein, 160 aa, unidentified; identical to SEQ ID NO: 4741
  REGION 1..160: note = Description of Unknown: uncultivated organism with predicted taxonomy: Bacteroides
  REGION 1..160: note = MG16-116 HNH domain

SEQ ID NO: 4836 - protein, 160 aa, unidentified; identical to SEQ ID NO: 4787
  REGION 1..160: note = Description of Unknown: uncultivated organism with predicted taxonomy: Bacteroides sp. CAG:770
  REGION 1..160: note = MG16-118 HNH domain

SEQ ID NO: 4837 - protein, 160 aa, unidentified; identical to SEQ ID NO: 4754
  REGION 1..160: note = Description of Unknown: uncultivated organism with predicted taxonomy: Bacteroides sp. CAG:709
  REGION 1..160: note = MG16-119 HNH domain

SEQ ID NO: 4838 - protein, 160 aa, unidentified; identical to SEQ ID NO: 4770
  REGION 1..160: note = Description of Unknown: uncultivated organism with predicted taxonomy: Bacteroides sp. CAG:709
  REGION 1..160: note = MG16-120 HNH domain

SEQ ID NO: 4839 - protein, 160 aa, unidentified
  REGION 1..160: note = Description of Unknown: uncultivated organism with predicted taxonomy: Bacteroides sp. CAG:770
  REGION 1..160: note = MG16-121 HNH domain
ELKLSKAGRESAAKNVRTREKANEEIAKRIEELGLVPSKNKILKYRLWEESGKRCFYCGQPVSATEFLNGLDVEIEHVVPKSLLFDDSFSNKVCACRKCNAEKGNATAFDFMKGHGENAFEDYLKRVETAFKENRISQTKRNRLLTPADKIPKDFISRQL

SEQ ID NO: 4840 - protein, 160 aa, unidentified
  REGION 1..160: note = Description of Unknown: uncultivated organism with predicted taxonomy: Bacteroides sp. CAG:770
  REGION 1..160: note = MG16-122 HNH domain
ELKLSKAGRESAAKNIRTREKANEEIAKRIEELGLVPSKNKILKYRLWEEFGKRCFYCGQPVSATEFLNGLDVEIEHVVPKSLLFDDSFSNKVCACRKCNAEKGNATAFDFMKGRGENAFEDYLKRVETAFKENRISQTKRNRLLTPADKIPKDFISRQL

SEQ ID NO: 4841 - protein, 160 aa, unidentified; identical to SEQ ID NO: 4747
  REGION 1..160: note = Description of Unknown: uncultivated organism with predicted taxonomy: Bacteroides sp. CAG:545
  REGION 1..160: note = MG16-123 HNH domain

SEQ ID NO: 4842 - protein, 160 aa, unidentified
  REGION 1..160: note = Description of Unknown: uncultivated organism with predicted taxonomy: Bacteroides sp. CAG:770
  REGION 1..160: note = MG16-126 HNH domain
ELKLSKEGRAATAKNIRDREKMNNEMAEKIKELGITPSKNKILKYRLWQESGQKCFYCGQPVGAAEFLCGLDVEIEHIVPKALLFDDSFSNKVCACRKCNAEKSNTTAYDYMKSKGENEFNDYLRRVDAAFNEHKISFTKRSRLLTPADKLPKDFISRQL

SEQ ID NO: 4843 - protein, 160 aa, unidentified; identical to SEQ ID NO: 4754
  REGION 1..160: note = Description of Unknown: uncultivated organism with predicted taxonomy: Bacteroides sp. CAG:709
  REGION 1..160: note = MG16-127 HNH domain

SEQ ID NO: 4844 - protein, 160 aa, unidentified; identical to SEQ ID NO: 4741
  REGION 1..160: note = Description of Unknown: uncultivated organism with predicted taxonomy: Bacteroides sp. CAG:770
  REGION 1..160: note = MG16-128 HNH domain

SEQ ID NO: 4845 - protein, 160 aa, unidentified; identical to SEQ ID NO: 4754
  REGION 1..160: note = Description of Unknown: uncultivated organism with predicted taxonomy: Bacteroides sp. CAG:709
  REGION 1..160: note = MG16-129 HNH domain

SEQ ID NO: 4846 - protein, 160 aa, unidentified
  REGION 1..160: note = Description of Unknown: uncultivated organism with predicted taxonomy: Bacteroides sp. CAG:770
  REGION 1..160: note = MG16-130 HNH domain
ELKLSKAGRESAANNIRTREKANEEIAKRIEELGLVPSKNKILKYRLWEESGKRCFYCGQPVSATEFLNGLDVEIEHVVPKSLLFDDSFSNKVCACRKCNAEKGNATAFDFMKGRGENAFEDYLKRVETAFKENKISQTKRNRLLTPADKIPKDFISRQL

SEQ ID NO: 4847 - protein, 160 aa, unidentified
  REGION 1..160: note = Description of Unknown: uncultivated organism with predicted taxonomy: Bacteroides sp. CAG:709
  REGION 1..160: note = MG16-131 HNH domain
ELKLSKEGRAATAKNIRDREKENKEIAEKIIELGVTPSKNKILKYRLWQEAGQKCFYCGQPVGATEFLNGLDVEIEHVVPKALLFDDSFSNKVCACRKCNAEKRNSTAYDYMKSKGENAFNDYLRRVDTAFSEHKISFTKRSRLLTPADKIPKDFVSRQL

SEQ ID NO: 4848 - protein, 160 aa, unidentified; identical to SEQ ID NO: 4741
  REGION 1..160: note = Description of Unknown: uncultivated organism with predicted taxonomy: Bacteroides
  REGION 1..160: note = MG16-132 HNH domain

SEQ ID NO: 4849 - protein, 174 aa, unidentified
  REGION 1..174: note = Description of Unknown: uncultivated organism with predicted taxonomy: Bacteroidales
  REGION 1..174: note = MG16-133 HNH domain
ELKQSKEEREKTDRGIRKQQKANEVFANLLKEQGVRPTRNRILKYRLWRESYETCFYCGQPISFKEFLKFSDVEREHVIPKRLLYDDSFANQVCSCRKCNAEKGGRTAIDYMRTTQHLQPYLEKVDKMFQEHKISGKKHAHLLASYDDYLSRKKEGKETKDDIIIWEEAIERQL

SEQ ID NO: 4850 - protein, 197 aa, unidentified
  REGION 1..197: note = Description of Unknown: uncultivated organism
  REGION 1..197: note = MG16-134 HNH domain
ELKQSKDDRNTTYLQNEAMERLNDAIAKRLNSEGIKTTKRILEKYKYIFPTKGCIDKKTGKFVSKNFENLSTVNQCIYCGKSFSLTAALNGDGYEVEHIIPRDLICDNSQSNKVLSCRSCNSKKSNKTAFDFMRGQGEQALEDYIARIEKWYKDGIISPAKREHLLLSHEDYLKRKKEGKTTDEDKKYWEDFVSRQA

SEQ ID NO: 4851 - protein, 197 aa, unidentified
  REGION 1..197: note = Description of Unknown: uncultivated organism with predicted taxonomy: Porphyromonas sp. oral taxon 278
  REGION 1..197: note = MG16-135 HNH domain
ELKQSKDERNVTFLQNEAMQRLNDSIANRLSSEGIKPTKRTIEKYKFIFPTKGCFDKRTGKFITKNFENLSTVNRCIYCGQPFSLSAALNGDGYEVEHILPRDLICDNSQSNKVLSCRKCNSIKSNKTAFDFMRSQGEHAFETYLERVESWYKDGIISPSKRERLLLSHEDYLERKRKDKATDIDKKYWEDFVSRQA

SEQ ID NO: 4852 - protein, 160 aa, unidentified
  REGION 1..160: note = Description of Unknown: uncultivated organism with predicted taxonomy: Bacteroidales
  REGION 1..160: note = MG16-136 HNH domain
ELKQSRDERNDAYLSINKRERENKVIEERIREYGISPSKSRIQKYRLWEESNHLCFYCGHPVGAAEFLSGSGVEIEHIIPRSLLFDDSFANKVCACRQCNAEKGNSTAFDYMKSKPANDFEDYLKRVEKYFTEKRISKTKRERLLTPASEIPQDFIDRQL

SEQ ID NO: 4853 - protein, 174 aa, unidentified
  REGION 1..174: note = Description of Unknown: uncultivated organism with predicted taxonomy: Prevotella
  REGION 1..174: note = MG16-137 HNH domain
ELKQSKDERNETEIGIRKQQKLNDEYAKILKEEGVRPTRNRILKYRLWRESNKSCFYCEQPISFHEFLDFSETEREHIIPKKLMYDDSFANQVCSCRNCNKEKGGRTAMDYMRTKQNLQFYLDKVDKMFQDHKISGKKRSHLLASYDDYLFRKENGKETKDDILIWEKPIERQL

SEQ ID NO: 4854 - protein, 160 aa, unidentified
  REGION 1..160: note = Description of Unknown: uncultivated organism
  REGION 1..160: note = MG16-138 HNH domain
ELKQSRDERNSAFLNNNKRERDNKAISERIQEMGIRASRSRILKYRLWEEAKHICFYCGQTVGVKEFLEGTDVEIEHIIPRSLFFDDSFSNKVCACRKCNAEKGNRTAYDYMKQKSDNDFADYTRRIEDAYEKKEISKTKRERLLTTAKDIPEDFIDRQL

SEQ ID NO: 4855 - protein, 161 aa, unidentified
  REGION 1..161: note = Description of Unknown: uncultivated organism with predicted taxonomy: Bacteroidales
  REGION 1..161: note = MG16-139 HNH domain
ELKQSRDERESAYKAINKNERENSTIANRILEDYGIRPSRSRIQKYRMWEESKQRCFYCGKMIDVKQFLSGADVEIEHIVPRSILFDDSYSNKVCACRECNQEKGNLTAMEYMEGKPTGEFEAYKQRVDEAFSEHRISKTKRDHLLWRRADIPQDFIERQL

SEQ ID NO: 4856 - protein, 160 aa, unidentified
  REGION 1..160: note = Description of Unknown: uncultivated organism with predicted taxonomy: Fibrobacter
  REGION 1..160: note = MG16-140 HNH domain
ELKQSKDERNTTASNIAKRERENKNIEAKIQEFGIRSSRNRIQKYRLWEESEQKCFYCGQPVQAKEFLSGLDVEVEHVIPKSLLFDDSFANKVCACRKCNAAKGNKTAYDFMKGQKEEVFDAYVKRVNDFYKDGKISKTKKERLLTTQSEIPSDFIERQL

SEQ ID NO: 4857 - protein, 160 aa, unidentified
  REGION 1..160: note = Description of Unknown: uncultivated organism with predicted taxonomy: Bacteroidales
  REGION 1..160: note = MG16-141 HNH domain
ELKQSREEREGAYRRNNQNERLNKEIAAKIEEMGIRPSRSRIQKYKMWEESNHRCMYCGKTVSLAEFLNGADVEIEHIIPRSILFDDSFSNKVCACRECNHEKGNMTALDYLETKPAAEVEAYKQRVDEAFKEGRISKTKRDHLLWHKSDIPTDFIDRQL

SEQ ID NO: 4858 - protein, 160 aa, unidentified
  REGION 1..160: note = Description of Unknown: uncultivated organism with predicted taxonomy: Bacteroidales
  REGION 1..160: note = MG16-142 HNH domain
ELKQSREERESAYKAINKNEHENAERAAKIAEFGIRPSRSRVQKYKMWEESQHRCFYCGKMVDLAQFLNGADVEIEHIVPRSILFDDSFSNKVCACRECNKEKGNLTAMEYIETKPVGEQEAYKQRVAEAFDAHRISKTKRDHLLWRRADIPQDFIERQL

SEQ ID NO: 4859 - protein, 160 aa, unidentified
  REGION 1..160: note = Description of Unknown: uncultivated organism with predicted taxonomy: Deminuibacter soli
  REGION 1..160: note = MG16-143 HNH domain
ELKQSRDERNDAFLKNNKRERENKVIEERIREYGITPSRSRIQKYRLWEESNHLCFYCGQPVGAAEFLSGSGVEIEHIIPRSLLFDDSYANKVCSCRKCNAEKGNSTAYDYMKAKPEGDFEDYLKRIEKFFSEKRISKSKREKLLTPASEIPQDFIDRQL

SEQ ID NO: 4860 - protein, 197 aa, unidentified
  REGION 1..197: note = Description of Unknown: uncultivated organism with predicted taxonomy: Bacteroidales
  REGION 1..197: note = MG16-144 HNH domain
ELKQSKDERNTTFLQNEAMQRLNESIAKRLVSENINPTKRIIDKYKFIFPTKGCFDKRTGKFITKNFESLSTVNRCIYCGQSFSLSEALNGDGYEIEHILPRDLICDNSQNNKVLSCRKCNSIKSNKTAFDYMRTQDKNAFEAYLERVESWYKDGIISPAKRERLLLSHEDYLERKRIGKETDEDKKYWEEFVSRQA

SEQ ID NO: 4861 - protein, 197 aa, unidentified
  REGION 1..197: note = Description of Unknown: uncultivated organism with predicted taxonomy: Bacteroides
  REGION 1..197: note = MG16-145 HNH domain
ELKQSKDERNTTFLQNEAMQRLNESITKRLESENIKPTKRIIEKYKFIFPTKGCFDKRTGKFITKNFEDLSTINYCIYCGQPFSLSAALNGDGYEVEHILPRDLICDNSQNNKVLSCRRCNSIKSNKTAFDFMRSQEKNAFEAYLERVETWYQDGIISPGKRERLLLSHEDYLERKRLGKETDEDKKYWEEFVSRQA

SEQ ID NO: 4862 - protein, 160 aa, unidentified
  REGION 1..160: note = Description of Unknown: uncultivated organism with predicted taxonomy: Bacteroidetes
  REGION 1..160: note = MG16-146 HNH domain
ELKQSKDERNSTFLNNNKRERENKIIEERIAEMGIRPSRSRILKYRLWEEAKHICFYCGQPVGVKEFLEGAEVEIEHIIPRSLFFDDSFANKVCSCRKCNAEKGNRTAFDYMKQKGENEFSDYSRRIEEAFEKKEISKVKRERLLTSAKDIPEDFIDRQL

SEQ ID NO: 4863 - protein, 160 aa, unidentified
  REGION 1..160: note = Description of Unknown: uncultivated organism with predicted taxonomy: Bacteroidales
  REGION 1..160: note = MG16-147 HNH domain
ELKQSREERESAYRAMGQNERRNKEIAEKISEFGIRPSRSRIQKYKMWEESMHQCFYCGKTIDLSEFLNGADVEIEHIIPRSILFDDSFSNKVCACRRCNQEKGNQTAMEYMETKSAAEQEAYKQRVDEAFTAKRISKTKRDHLLWRKADIPADFIERQL

SEQ ID NO: 4864 - protein, 160 aa, unidentified
  REGION 1..160: note = Description of Unknown: uncultivated organism with predicted taxonomy: Bacteroidales
  REGION 1..160: note = MG16-148 HNH domain
ELKQSRDERESAYKAMGQNERRNKEIAAKITEFGIRPSRSRIQKYKMWEESLHQCFYCGKTIDLSEFLNGADVEIEHIIPRSILFDDSFSNKVCACRRCNQEKGNQTAMEYMETKSAAEQEAYKQRVDEAFTAKRISKTKRDHLLWRKTDIPSDFIERQL

SEQ ID NO: 4865 - protein, 197 aa, unidentified
  REGION 1..197: note = Description of Unknown: uncultivated organism with predicted taxonomy: Bacteroidetes
  REGION 1..197: note = MG16-149 HNH domain
ELKQSKDERNVTFLQNEAMQRLNDSIANRLSSEGIKPTKRTIEKYKFIFPTKGCFDKRTGKFITKNFENLSTVNRCIYCGQPFSLSAALNGDGYEVEHILPRDLICDNSQSNKVLSCRKCNSIKSNKTAFDFMRSQGEHAFETYLERVESWYKDGIISPSKRERLLLSHEDYLERKKKGKITDIDKKYWEDFVSRQA

SEQ ID NO: 4866 - protein, 174 aa, unidentified
  REGION 1..174: note = Description of Unknown: uncultivated organism with predicted taxonomy: Bacteroidales
  REGION 1..174: note = MG16-150 HNH domain
ELKQSKTEREEASAGIRKQQALNDNYANILKSESIRPTRNKILKYRLWTESNKTCFYCDQPVNFKEYLQTTEFEREHVIPKRLIFDDSFANQVCSCSKCNKEKGGLTALDFMRTKANLRNYLDKVDSMYQKHEISGKKRSHLLASYDDYLERKKEGKETKEDIMIWETPIDRQL

SEQ ID NO: 4867 - protein, 197 aa, unidentified; identical to SEQ ID NO: 4861
  REGION 1..197: note = Description of Unknown: uncultivated organism with predicted taxonomy: Prevotella
  REGION 1..197: note = MG16-151 HNH domain

SEQ ID NO: 4868 - protein, 161 aa, unidentified
  REGION 1..161: note = Description of Unknown: uncultivated organism with predicted taxonomy: Fibrobacter
  REGION 1..161: note = MG16-152 HNH domain
ELKQSKDERNTTFNNIAKRERENKGIAERIKNEYGLIPNRNKIEKYRLWEEAEQKCFYCGQTVNVKEFLSGFDVEVEHVIPKSLLFDDSYANKVCACRKCNANKGNKTAFDFMKSQSEDAFNNYVSRVEEYYKNGKISRTKHDRLLTPQSEIPSDFIERQL

SEQ ID NO: 4869 - protein, 160 aa, unidentified
  REGION 1..160: note = Description of Unknown: uncultivated organism with predicted taxonomy: Bacteroidales
  REGION 1..160: note = MG16-153 HNH domain
ELKQSREEREGAYRRNNQNERLNKEIIAKIEEMGIRPSRSRIQKYKMWEENNHRCMYCGKTVSLAEFLNGADVEIEHIIPRSILFDDSFSNKVCACRECNHEKGNMTALDYIETKPAAEQEAYKQRVDEAFKEGRISKTKRDHLLWHRSEIPTDFIERQL

SEQ ID NO: 4870 - protein, 160 aa, unidentified
  REGION 1..160: note = Description of Unknown: uncultivated organism with predicted taxonomy: Bacteroidales
  REGION 1..160: note = MG16-154 HNH domain
ELKQSRDERESAYKAMGQNERRNKEIAAKIAEFGIRPSRSRIQKYKMWEESQHQCFYCGKTIDLSEFLNGADVEIEHIIPRSILFDDSFSNKVCACRRCNQEKGNQTAMEYMETKSAAEQETYKQRVDEAFTAKRISKTKRDHLLWRKADIPADFIERQL

SEQ ID NO: 4871 - protein, 160 aa, unidentified
  REGION 1..160: note = Description of Unknown: uncultivated organism with predicted taxonomy: Bacteroidales
  REGION 1..160: note = MG16-155 HNH domain
ELKQSRDERNSTFLNNSKRERENKIISERIQEMGIRPSRNRIQKYRLWEESKHICFYCGQPVGVREFMEGVDVEIEHIIPRSLFFDDSFSNKVCACRKCNAEKGNRTAYDYVKKKGENEFADYTRRIEEAFEKKEISKTKRERLLTSAKDIPEDFIDRQL

SEQ ID NO: 4872 - protein, 160 aa, unidentified
  REGION 1..160: note = Description of Unknown: uncultivated organism with predicted taxonomy: Bacteroidales
  REGION 1..160: note = MG16-156 HNH domain
ELKQSREERESAYKAINKNERENAERAAKIAEFGIRPSRSRVQKYKMWEESQHRCFYCGKMVDLAQFLNGADVEIEHIVPRSILFDDSFSNKVCACRECNKEKGNLTAMEYIETKPVGEQEAYKQRVAEAFDAHRISKTKRDHLLWRRADIPQDFIERQL

SEQ ID NO: 4873 - protein, 160 aa, unidentified
  REGION 1..160: note = Description of Unknown: uncultivated organism with predicted taxonomy: Fibrobacter
  REGION 1..160: note = MG16-157 HNH domain
ELKQSKDERKATAANIAKRERENKAIAAKIEEFGIRPSRNRIQKYRLWEESEQKCFYCGQPVDAREFLSGLDVEVEHIIPKSLLFDDSFANKVCACRKCNAAKGNRTAFDYMKSQSSNAFDAYIKRVNDFYKDGKISKTKNERLLTTQSEIPSDFIERQL

SEQ ID NO: 4874 - protein, 160 aa, unidentified
  REGION 1..160: note = Description of Unknown: uncultivated organism with predicted taxonomy: Bacteroidetes
  REGION 1..160: note = MG16-158 HNH domain
ELKQSRDERNNAFLNNNKRERENKVLEERIREYGISPSRSRIQKYRLWEESNHLCFYCGQPVGAAEFLSGSGVEIEHIIPRSLLFDDSYANKVCSCRKCNAEKGNSTAYDYMKAKPEGDFEDYLKRIETFFSEKRISKAKRDKLLTPATDIPQDFIDRQL

SEQ ID NO: 4875 - protein, 177 aa, unidentified
  REGION 1..177: note = Description of Unknown: uncultivated organism with predicted taxonomy: Bacteroidetes
  REGION 1..177: note = MG16-159 HNH domain
ELKQSKDERNEAFRRNNQNERLNKEYAERIKEYGLTPTRNRIMKMKMWEESEYTCMYCGQPVNVTEFLQGADVEREHIIPRGLLFDNSFTNQVCSCRRCNSQKGMRTAYDFIADDKGQEGLDSYIDRINDLFNRKQISRSKFNRLLVSHKAYMSRKAQGKETEEDKELWENFIDRQL

SEQ ID NO: 4876 - protein, 160 aa, unidentified
  REGION 1..160: note = Description of Unknown: uncultivated organism with predicted taxonomy: Fibrobacter
  REGION 1..160: note = MG16-160 HNH domain
ELKQSKDERNTTASNIAKRERENEKIEAKIQEFGIRSSRNRIQKYRLWEESEQKCFYCGDTVNVKEFLSGLDVEVEHVIPKSLLFDDSFANKVCACRKCNAAKGNKTAYDFMEGQKKEVFDAYVKRVNDFYKDGKISKTKKERLLTTQSKIPSDFIERQL

SEQ ID NO: 4877 - protein, 160 aa, unidentified
  REGION 1..160: note = Description of Unknown: uncultivated organism with predicted taxonomy: Bacteroidales
  REGION 1..160: note = MG16-161 HNH domain
ELKQSREERENAYKRNNQNERLNKEIAAKIEEMGIRPSRSRIQKYKMWEESDHRCMYCGKMVSLAEFLNGADVEIEHIIPRSILFDDSYSNKVCACRDCNREKDNLTALDYLETKTGAELEAYKQRVDDAFKEGRISKTKRDHLLWRREDIPSDFIERQL

SEQ ID NO: 4878 - protein, 177 aa, unidentified
  REGION 1..177: note = Description of Unknown: uncultivated organism with predicted taxonomy: Prevotella
  REGION 1..177: note = MG16-162 HNH domain
ELKQSKDERNEAFKRNNQNEKKNKEYAEHIKEYQLTPTRNRLLKWKLYEESDHACMYCGQPIKVREFLQGADVEREHIIPKGLLFDNSFTNQVCSCRSCNSKKGMRTAYDFIEAEKGEEGLRSYIEHINYLFDKKNISRSKYNRLLVSYKAYLQRKVQGKETEEDKNLWENFIDRQL

SEQ ID NO: 4879 - protein, 197 aa, unidentified; identical to SEQ ID NO: 4861
  REGION 1..197: note = Description of Unknown: uncultivated organism with predicted taxonomy: Bacteroides
  REGION 1..197: note = MG16-163 HNH domain

SEQ ID NO: 4880 - protein, 177 aa, unidentified
  REGION 1..177: note = Description of Unknown: uncultivated organism with predicted taxonomy: Prevotella
  REGION 1..177: note = MG16-164 HNH domain
ELKQSKDERNETYRRNNQNEKKNKEYAERIKKYELTPTRNRIMKMKMLEESEYKCMYCGQPVKEKEFLQGADVEREHIIPRALLFDNSFTNQVCSCRSCNSQKGMRTAYDFIADDKGQEGLEAYIERINDLFNKKKISRSKLNRLLVSYKAYVSRKAQGKETEEDVQLWENFIDRQL

SEQ ID NO: 4881 - protein, 160 aa, unidentified
  REGION 1..160: note = Description of Unknown: uncultivated organism
  REGION 1..160: note = MG16-165 HNH domain
ELKQSREEREGAYRRNNQNERLNKEIAAKIEEMGIRPSRSRIQKYKMWEESNHRCMYCGKTVSLAEFLNGADVEIEHIIPRSILFDDSFSNKVCACRECNHEKGNMTALDYLETKPATEVEAYKQRVDEAFKEGQISKTKRDHLLWHRSDIPTDFIDRQL

SEQ ID NO: 4882 - protein, 177 aa, unidentified
  REGION 1..177: note = Description of Unknown: uncultivated organism with predicted taxonomy: Bacteroidales
  REGION 1..177: note = MG16-166 HNH domain
ELKQNREERNEAFKRNAQNEKLNKEYAERIKEYGLTPTRNRIMKMKMWEESENTCMYCGQPVDVVEFLQGADVEREHIIPRGLLFDNSFTNQVCSCRKCNSQKGMRTAYDFIEDEKGQEGLESYIKHINYLFDKKKINRSKLNRLLVSHKAYINRKSLGKETEEDKQLWENFIDRQL

SEQ ID NO: 4883 - protein, 160 aa, unidentified
  REGION 1..160: note = Description of Unknown: uncultivated organism with predicted taxonomy: Bacteroidales
  REGION 1..160: note = MG16-167 HNH domain
ELKQSRDERESAYKAMGQNERRNKEIAAKIAEFGIRSSRSRIQKYKMWEESLHQCFYCGKTIDLSEFLNGADVEIEHIIPRSILFDDSFSNKVCACRRCNQEKGNQTAMEYMETKSASEQEAYKQRVDEAFTTKRISLTKRDHLLWHKADIPSDFIDRQE

SEQ ID NO: 4884 - protein, 174 aa, unidentified
  REGION 1..174: note = Description of Unknown: uncultivated organism with predicted taxonomy: Barnesiella viscericola
  REGION 1..174: note = MG16-168 HNH domain
ELKQSKDERKETENGIRKQQKMNDEYANILKEEGIRPTRNRVLKYRLWRESNETCFYCERPINFNEFLKFSDIEREHIIPKKLIFDDSFANQVCSCRKCNKEKGGRTALDYMQTTPNLQMYLDKVDKMFQEHKISGKKHLHLLASYEDYLIRKKEGKETKDDIKIWETPIERQL

SEQ ID NO: 4885 - protein, 160 aa, unidentified; identical to SEQ ID NO: 4858
  REGION 1..160: note = Description of Unknown: uncultivated organism with predicted taxonomy: Bacteroidales
  REGION 1..160: note = MG16-169 HNH domain

SEQ ID NO: 4886 - protein, 160 aa, unidentified; identical to SEQ ID NO: 4854
  REGION 1..160: note = Description of Unknown: uncultivated organism
  REGION 1..160: note = MG16-170 HNH domain

SEQ ID NO: 4887 - protein, 160 aa, unidentified; identical to SEQ ID NO: 4877
  REGION 1..160: note = Description of Unknown: uncultivated organism with predicted taxonomy: Bacteroidales
  REGION 1..160: note = MG16-171 HNH domain

SEQ ID NO: 4888 - protein, 160 aa, unidentified
  REGION 1..160: note = Description of Unknown: uncultivated organism with predicted taxonomy: Prevotella brevis
  REGION 1..160: note = MG16-172 HNH domain
ELKQSREEREGAYRRNNQNERLNKEIAAKIEEMGIRPSRSRIQKYKMWEETNHRCMYCGKTVSLAEFLNGADVEIEHIIPRSILFDDSFSNKVCACRECNHEKGNMTALDYIETKPAAEVEAYKQRVDEAFKEGQISKTKRDHLLWHKSDIPTDFIDRQL

SEQ ID NO: 4889 - protein, 197 aa, unidentified; identical to SEQ ID NO: 4861
  REGION 1..197: note = Description of Unknown: uncultivated organism with predicted taxonomy: Bacteroides
  REGION 1..197: note = MG16-173 HNH domain

SEQ ID NO: 4890 - protein, 160 aa, unidentified
  REGION 1..160: note = Description of Unknown: uncultivated organism with predicted taxonomy: Bacteroidetes
  REGION 1..160: note = MG16-174 HNH domain
ELKQSRDERESAYKAMGKNERRNKEIAEKIAEFGIRPSRSRIQKYKMWEESMHQCFYCGKTIDLAEFLNGADVEIEHIIPRSILFDDSFSNKVCACRRCNQEKSNQTAMEYMETKPVGELEAYKRRVDEAFTAKRISKTKRDHLLWRKADIPTDFIERQL

SEQ ID NO: 4891 - protein, 174 aa, unidentified; identical to SEQ ID NO: 4884
  REGION 1..174: note = Description of Unknown: uncultivated organism with predicted taxonomy: Prevotella
  REGION 1..174: note = MG16-175 HNH domain

SEQ ID NO: 4892 - protein, 160 aa, unidentified
  REGION 1..160: note = Description of Unknown: uncultivated organism with predicted taxonomy: Bacteroidales
  REGION 1..160: note = MG16-176 HNH domain
ELKQSRDERESAYKAMGQNERRNKEIAAKIAEFGIRPSRSRIQKYKMWEESLHQCFYCGKTIDLSEFLNGADVEIEHIIPRSILFDDSFSNKVCACRRCNQEKGNQTAMEYMETKSAAEQETYKQRVDEAFTAKRISKTKRDHLLWRKADIPADFIERQL

SEQ ID NO: 4893 - protein, 160 aa, unidentified; identical to SEQ ID NO: 4869
  REGION 1..160: note = Description of Unknown: uncultivated organism with predicted taxonomy: Bacteroidia
  REGION 1..160: note = MG16-177 HNH domain

SEQ ID NO: 4894 - protein, 160 aa, unidentified; identical to SEQ ID NO: 4872
  REGION 1..160: note = Description of Unknown: uncultivated organism with predicted taxonomy: Porphyromonas sp. oral taxon 278
  REGION 1..160: note = MG16-178 HNH domain

SEQ ID NO: 4895 - protein, 160 aa, unidentified; identical to SEQ ID NO: 4854
  REGION 1..160: note = Description of Unknown: uncultivated organism
  REGION 1..160: note = MG16-179 HNH domain

SEQ ID NO: 4896 - protein, 160 aa, unidentified
  REGION 1..160: note = Description of Unknown: uncultivated organism with predicted taxonomy: Bacteroidales
  REGION 1..160: note = MG16-180 HNH domain
ELKQSREERENAFKRNNQNERLNKEIADKIEEMGIRPSRSRIQKYKMWEESNHRCMYCGKTVSLAEFLNGADVEIEHIIPRSILFDDSFSNKVCACRECNHEKDNMTALDYLETKPAVEVDAYKQRVDEAFKEGRISKTKRDHLLWHKSDIPQDFIDRQL

SEQ ID NO: 4897 - protein, 160 aa, unidentified; identical to SEQ ID NO: 4872
  REGION 1..160: note = Description of Unknown: uncultivated organism with predicted taxonomy: Bacteroidales
  REGION 1..160: note = MG16-181 HNH domain

SEQ ID NO: 4898 - protein, 177 aa, unidentified; identical to SEQ ID NO: 4875
  REGION 1..177: note = Description of Unknown: uncultivated organism with predicted taxonomy: Prevotella
  REGION 1..177: note = MG16-182 HNH domain

SEQ ID NO: 4899 - protein, 177 aa, unidentified
  REGION 1..177: note = Description of Unknown: uncultivated organism with predicted taxonomy: Prevotella
  REGION 1..177: note = MG16-183 HNH domain
ELKQSKDERNEAFRRNNQNERLNKEYAERIKEYGLTPTRNRIMKMKMWEESEYTCMYCGQPVNVTEFLQGADVEREHIIPRGLLFDNSFTNQVCSCRRCNSQKGMRTAYDFIADDKGQEGLDSYIDRINDLFNRKQISRSKFNRLLVSHKAYMNRKAQGKETEEDKELWENFIDRHL

SEQ ID NO: 4900 - protein, 160 aa, unidentified; identical to SEQ ID NO: 4872
  REGION 1..160: note = Description of Unknown: uncultivated organism with predicted taxonomy: Bacteroidales
  REGION 1..160: note = MG16-184 HNH domain

SEQ ID NO: 4901 - protein, 160 aa, unidentified; identical to SEQ ID NO: 4876
  REGION 1..160: note = Description of Unknown: uncultivated organism with predicted taxonomy: Fibrobacter
  REGION 1..160: note = MG16-185 HNH domain

SEQ ID NO: 4902 - protein, 177 aa, unidentified; identical to SEQ ID NO: 4880
  REGION 1..177: note = Description of Unknown: uncultivated organism with predicted taxonomy: Prevotella
  REGION 1..177: note = MG16-186 HNH domain

SEQ ID NO: 4903 - protein, 160 aa, unidentified
  REGION 1..160: note = Description of Unknown: uncultivated organism with predicted taxonomy: Bacteroidales
  REGION 1..160: note = MG16-187 HNH domain
ELKQSRDERESAYRAMGQNERRNKEIAAKIAEFGIRPSRSRIQKYKMWEKSLHQCFYCGKTIDLSEFLNGADVEIEHIIPRSILFDDSFSNKVCACRRCNQEKGNQTAMEYMETKSAAEQEAYKQRVDEAFTAKRISKTKRDHLLWRKADIPSDFIERQL

SEQ ID NO: 4904 - protein, 177 aa, unidentified
  REGION 1..177: note = Description of Unknown: uncultivated organism
  REGION 1..177: note = MG16-188 HNH domain
ELKQSKDERNETFKRNNQNERQNKEYAERIKKYGLTPTRNRIMKLKMWEESEHACMYCEQPVDPIEFLKGSDVEREHIIPRGLLFDNSFTNQVCSCRRCNSKKGMRTAYDFIADDKGQEGLNAYIEHINDLFDKKKISRSKLNRLLVSHKAYISRKAQGKETEEDKDLWENFIDRQL

SEQ ID NO: 4905 - protein, 177 aa, unidentified; identical to SEQ ID NO: 4904
  REGION 1..177: note = Description of Unknown: uncultivated organism
  REGION 1..177: note = MG16-189 HNH domain

SEQ ID NO: 4906 - protein, 177 aa, unidentified
  REGION 1..177: note = Description of Unknown: uncultivated organism with predicted taxonomy: Prevotella ruminicola
  REGION 1..177: note = MG16-190 HNH domain
ELKQSKDERNEVFKRNSQNERKNKEYAERIKEYGLTPTRNRIMKMRMWEESEYTCMYCGQPVNVSEFLKGADVEREHIIPRGLLFDNSFTNQVCSCRRCNSKKGMRTAYDFIADEKGQEGLDIYIDRINDLFNRKKISRSKFNRLMASHKAYMSRKAQGKETDEDKELWENFIDRQL

SEQ ID NO: 4907 - protein, 160 aa, unidentified
  REGION 1..160: note = Description of Unknown: uncultivated organism with predicted taxonomy: Labilibaculum filiforme
  REGION 1..160: note = MG16-191 HNH domain
ELKQSRDERESAYKAMGQNERRNKEIAAKIAEFGIRPSRSRIQKYKMWEKSLHQCFYCGKTIDLSEFLNGADVEIEHIIPRSILFDDSFSNKVCACRRCNQEKGNQTAMEYMETKSAAEQEAYKQRVDEAFTAKRISKTKRDHLLWRKADIPSDFIERQL

SEQ ID NO: 4908 - protein, 177 aa, unidentified
  REGION 1..177: note = Description of Unknown: uncultivated organism with predicted taxonomy: Bacteroidales
  REGION 1..177: note = MG16-192 HNH domain
ELKQSKDERNEAFKRNNQNERLNKELAERIMKYGLTPTRNRILKLKMWEESEHSCMYCGQPVDPVEFLKGVDVEREHIIPRGLLFDNSFTNQVCSCRRCNSKKGMRTAYDFIADDKGQEGLDTYIDRINDLFNRKKISRSKFNRLLASHKAYISRKSQGKETDEDKELWENFIDRQL

SEQ ID NO: 4909 - protein, 160 aa, unidentified
  REGION 1..160: note = Description of Unknown: uncultivated organism
  REGION 1..160: note = MG16-193 HNH domain
ELKQTKDERNTTASNIAKRERENKNIEAKIQEFGIRSSRNRIQKYRLWEESDQKCFYCGQPVQAKEFLSGLDVEVEHIIPKSLLFDDSFANKVCACRKCNAAKGNKTAYDFMKGQKEEVFDAYVKRVNDFYKDGKISKTKKERLLTTQSDIPSDFIERQL

SEQ ID NO: 4910 - protein, 177 aa, unidentified
  REGION 1..177: note = Description of Unknown: uncultivated organism with predicted taxonomy: Sediminibacterium sp. C3
  REGION 1..177: note = MG16-194 HNH domain
ELKQSKDERNETFRRNSQNEKKNKEFAEHIKEYNLTPTRNRILKWKLYEESDHSCMYCGQSINIRDFLQGADAEREHIVPRGLLFDNSFTNQVCACRSCNSKKGMRTAYDFIEDEKGEEGLHSYIEHINYLFNKKNISRSKFNRLLVSHKAYLKRKALGKETEEDKELWDNFIDRQL

SEQ ID NO: 4911 - protein, 175 aa, unidentified
  REGION 1..175: note = Description of Unknown: uncultivated organism with predicted taxonomy: Bacteroides
  REGION 1..175: note = MG16-195 HNH domain
ELKQSKDERHDTSEVIKALENKNKEYKTFIEKEYKLKATRKNLLRYRLWIESNQSCFYCLKPIKFTPFANESEEEREHILPKALHYDDSFANQVCSCKDCNSTKGGRTAMDYMRTTPYLQHYIDRVNKLYQANKISGKKYSHLLASYDDYQLRKKEGKETKEDILIWEKPIDRQL

SEQ ID NO: 4912 - protein, 177 aa, unidentified
  REGION 1..177: note = Description of Unknown: uncultivated organism with predicted taxonomy: Gammaproteobacteria bacterium
  REGION 1..177: note = MG16-196 HNH domain
ELKQSKDERNEAFKRNSQNERENKEYAERIKEYGLTPTRNRIMKMRMWEESEYTCMYCGQPVNVVEFLKGADVEREHIIPRGLLFDNSFTNQVCSCRRCNSKKGMRTAYDFIADDKGQEGLDTYIDRINDLFNRKKISRSKFNRLLASHKAYISRKSQGKETDEDKELWENFIDRQL

SEQ ID NO: 4913 - protein, 174 aa, unidentified
  REGION 1..174: note = Description of Unknown: uncultivated organism with predicted taxonomy: Bacteroides
  REGION 1..174: note = MG16-197 HNH domain
ELKQSKDERKEASDGIRKQQKRNEEYAKMLVEEGVRPTRNRILRYRLWEESNKRCFYCGQPISFNEFIKSSDAEREHVIPKALMFDDSFANQVCSCRECNKEKGGRTALDYMRTKSNLQAYLDRVDDMYQSHQIGGKKHSHLLASYDDYLSRKKEGKETKEDIMIWETPIERQL

SEQ ID NO: 4914 - protein, 177 aa, unidentified
  REGION 1..177: note = Description of Unknown: uncultivated organism with predicted taxonomy: Bacteroidales
  REGION 1..177: note = MG16-198 HNH domain
ELKQSKDERNEAFKRNNQNERLNKELAERIMKYGLTPTRNRILKLKMWEESEHSCMYCGQPVDPVEFLKGVDVEREHIIPRGLLFDNSFTNQVCSCRRCNSKKGMRTAYDFIADDKGQEGLDTYIDRINDLFNRKKISRSKFNRLLASHKAYINRKALGKETDEDKELWENFIDRQL

SEQ ID NO: 4915 - protein, 177 aa, unidentified; identical to SEQ ID NO: 4908
  REGION 1..177: note = Description of Unknown: uncultivated organism with predicted taxonomy: Gammaproteobacteria bacterium
  REGION 1..177: note = MG16-199 HNH domain

SEQ ID NO: 4916 - protein, 160 aa, unidentified
  REGION 1..160: note = Description of Unknown: uncultivated organism with predicted taxonomy: Fibrobacter
  REGION 1..160: note = MG16-200 HNH domain
ELKQSKDERNTTASNIAKKERENKNIEAKIQEFGIRSSRNRIQKYRLWEESEQKCFYCGQPVQAKEFLSGLDVEVEHIIPKSLLFDDSFANKVCACRKCNADKGNKTAYDFMKGQKTEVFDAYVKRVNDFYKDGKISKTKKERLLTTQSEIPSDFIERQL

SEQ ID NO: 4917 - protein, 197 aa, unidentified
  REGION 1..197: note = Description of Unknown: uncultivated organism with predicted taxonomy: Prevotella
  REGION 1..197: note = MG16-201 HNH domain
ELKQSKDERNTTFLQNEAMQKLNESIATRLSSEGIKPTKRTIEKYKFIFPTKGCIDNRTGKFVTKNFDNLLTVNQCIYCGQPFSLSAALNGDGYEIEHIIPRDLICDNSQNNKVLSCRNCNSKKSNRTAFDFMRSQDNATFEAYLERVELWYQKGIISPAKRERLLLSYEDYLERKKKGKITDIDKKYWEDFVSRQA

SEQ ID NO: 4918 - protein, 161 aa, unidentified
  REGION 1..161: note = Description of Unknown: uncultivated organism
  REGION 1..161: note = MG16-202 HNH domain
ELKQSRDERESAYKAMGQNERRNKEIAAKIAEFGIRPSRSRIQKYKMWEESQHRCFYCGEMMDLTQFLNGADVEIEHIIPRSILFDDSYSNKVCACRRCNQEKGNMTAMEYMEAKPSAEFEAYKQRVDDVFNKDHRISKTKRDHLLWRRADIPQDFIDRQL

SEQ ID NO: 4919 - protein, 174 aa, unidentified
  REGION 1..174: note = Description of Unknown: uncultivated organism with predicted taxonomy: Bacteroides sp. CAG:144
  REGION 1..174: note = MG16-203 HNH domain
ELKQSKEERDETSKGISKQQKLNDEYANLLKESGIRPTRNKITRYRLWREANETCFYCGQPVNFNEFVKFSEAEREHIIPKSLILDDSFANQVCSCRKCNAEKGGRTAIDYMRTTPYLQAYLTKVDEMFQGHKISGKKHAHLLASYEDYLVRKQQGKETKEDVNIWEAPIDRQL

SEQ ID NO: 4920 - protein, 177 aa, unidentified
  REGION 1..177: note = Description of Unknown: uncultivated organism with predicted taxonomy: Bacteroidales
  REGION 1..177: note = MG16-204 HNH domain
ELKQSKDERNEAFRRNNQNERLNKELAERIKKYGLTPTRNRIMKLKMWEESEHSCMYCKQPVDPVEFLKGADVEREHIIPRALLFDNSFTNQVCSCRRCNSKKGMRTAYDFIADEKGQEGLNAYIEHINDLFDKKKISRSKLNRLLVSHKAYISRKAQGKETDEDKELWENFIDRQL

SEQ ID NO: 4921 - protein, 160 aa, unidentified; identical to SEQ ID NO: 4916
  REGION 1..160: note = Description of Unknown: uncultivated organism with predicted taxonomy: Fibrobacter
  REGION 1..160: note = MG16-205 HNH domain

SEQ ID NO: 4922 - protein, 177 aa, unidentified; identical to SEQ ID NO: 4908
  REGION 1..177: note = Description of Unknown: uncultivated organism with predicted taxonomy: Gammaproteobacteria bacterium
  REGION 1..177: note = MG16-206 HNH domain

SEQ ID NO: 4923 - protein, 174 aa, unidentified
  REGION 1..174: note = Description of Unknown: uncultivated organism
  REGION 1..174: note = MG16-207 HNH domain
ELKQSKEERDETSKGISKQQKLNDEYANLLKGKGIRPTRNKITRYRLLMESNETCFYCGQPVNFNEFVKFSEAEREHIIPKSLILDDSFANQVCSCRKCNAEKGGRTAIDYMRTTPHLQAFLSKVDEMFQGHKISGKKHAHLLASYEDYLVRKKQGKETKEDVNIWETPIDRQL

SEQ ID NO: 4924 - protein, 174 aa, unidentified
  REGION 1..174: note = Description of Unknown: uncultivated organism
  REGION 1..174: note = MG16-208 HNH domain
ELKQSKDEREKTSKDIRANKKKNDECAERVKEYGFSPTRNRIMRYKMWVETNHRCIYCNDGVNVKDFLSGVDVEREHIIPKALLFDDSFSNQTCSCRKCNRDKGSRTALDYIRDCGREEEYITRVNELLEKRQISKTKYNHLLTSYRDYLERKTQGKETQEDKDLWEHFIDRQL

SEQ ID NO: 4925 - protein, 197 aa, unidentified; identical to SEQ ID NO: 4917
  REGION 1..197: note = Description of Unknown: uncultivated organism with predicted taxonomy: Chryseobacterium vrystaatense
  REGION 1..197: note = MG16-209 HNH domain

SEQ ID NO: 4926 - protein, 160 aa, unidentified
  REGION 1..160: note = Description of Unknown: uncultivated organism
  REGION 1..160: note = MG16-210 HNH domain
ELKQSKDERNEVFLRNNKRERENAEIIKRIEEYGVRPSRSRIQKYRLWEESNQICFYCGNTVGVKEFLSGVDAEIEHIIPRSLFFDDSFSNKVCACRACNQEKGNRTAYDYMQSKSEIEFDNYLRRVENYYNEKKISKTKRERLLTAAKDIPQDFLDRQL

SEQ ID NO: 4927 - protein, 197 aa, unidentified
  REGION 1..197: note = Description of Unknown: uncultivated organism with predicted taxonomy: Prevotella
  REGION 1..197: note = MG16-211 HNH domain
ELKQSKDERNTTFLQNEAMQRLNESIAKRLSFEDIKPTKRTIEKYKFIFPTKGCIDKRTGKFVTKSFDGLSTINQCIYCGQPFSLSAALNGDGYEIEHIIPRDLLCDNSQNNKVLSCRKCNSRKSNKTAFDFMRSQDESIFEEYLERIELWYKNGIISPTKREHLLLSHEDYLERKKKGKVTDIDKKYWEDFVSRQV

SEQ ID NO: 4928 - protein, 177 aa, unidentified; identical to SEQ ID NO: 4878
  REGION 1..177: note = Description of Unknown: uncultivated organism with predicted taxonomy: Prevotella ihumii
  REGION 1..177: note = MG16-212 HNH domain

SEQ ID NO: 4929 - protein, 160 aa, unidentified
  REGION 1..160: note = Description of Unknown: uncultivated organism with predicted taxonomy: Treponema pedis
  REGION 1..160: note = MG16-213 HNH domain
ELKQSKDERNEVFLRNNKRERENAEITKRIEEYGIRPSRSRIQKYRLWEESNHICFYCGQPVGAKEFLSGVDVEIEHIIPRSLFFDDSFSNKVCACRKCNQDKGNSTAFDFMKAKPEVEFDNYLRRVESYYNEKRISKTKRDRLLTAAKDIPEDFINRQL

SEQ ID NO: 4930 - protein, 177 aa, unidentified
  REGION 1..177: note = Description of Unknown: uncultivated organism with predicted taxonomy: Sediminibacterium sp. C3
  REGION 1..177: note = MG16-214 HNH domain
ELKQSKDERNETFKRNNQNERQNKEYAERIKEYGLTPTRNRIMKMKMWEESEYTCMYCGQPVNVTEFLKGADVEREHIIPRGLLFDNSFTNQVCSCRRCNSKKGMRTAYDFIADDKGQEGLNAYIDRINDLFDKKKISRSKLNRLLVSHKAYISRKAQGKETEEDKELWENFIDRQL

SEQ ID NO: 4931 - protein, 177 aa, unidentified
  REGION 1..177: note = Description of Unknown: uncultivated organism with predicted taxonomy: Prevotella
  REGION 1..177: note = MG16-215 HNH domain
ELKQSRDERNETFKRNNQNERQNKVYAERIKEYGLTPTRNRIMKMKMWEESEYTCMYCGQPVNVTEFLKGADVEREHIIPRGLLFDNSFTNQVCSCRRCNSKKGMRTAYDFIADDKGQDGLNAYIDRINNLFDKKKISRSKLNRLLVSHKAYISRKAQGKETDEDKELWENFIDRQL

SEQ ID NO: 4932 - protein, 177 aa, unidentified
  REGION 1..177: note = Description of Unknown: uncultivated organism with predicted taxonomy: Bacteroidales
  REGION 1..177: note = MG16-216 HNH domain
ELKQSKDERNEAFKRNNQNERQNKEYAERIKEYGLTPTRNRIMKMKMWEESEYTCMYCGQPINVTEFLQGADVEREHIIPRALLFDNSFTNQVCSCRRCNSQKGMRTAYDFIADDKGQEGLDLYIERINDLFDRKKISRSKLNRLLVSHKAYVSRKAQGKETEEDKELWENFIDRQL

SEQ ID NO: 4933 - protein, 177 aa, unidentified
  REGION 1..177: note = Description of Unknown: uncultivated organism with predicted taxonomy: Porphyromonas catoniae
  REGION 1..177: note = MG16-217 HNH domain
ELKQSKDERNEAFKRNNQNERQNKEYAERIKVYGLTPTRNRIMKMKMWEESEYTCMYCGQPVNVTEFLQGADVEREHIIPRGLLFDNSFTNQVCSCRRCNSKKGMRTAYDFIADDKGQEGLDAYIDRINDLFNKKKISRSKLNRLLVSHKAYIIRKTQGKETEEDKELWENFIDRQL

SEQ ID NO: 4934 - protein, 177 aa, unidentified
  REGION 1..177: note = Description of Unknown: uncultivated organism with predicted taxonomy: Prevotella
  REGION 1..177: note = MG16-218 HNH domain
ELKQSKDERNEVFKRNSQNERKNKEYAERIKEYGLTPTRNRIMKMRMWEESEYTCMYCGQPVNVSEFLKGADVEREHIIPRGLLFDNSFTNQVCSCRRCNSKKGMRTAYDFIADEKGQEGLDIYIDRINDLFNRKKISRSKFNRLMASHKAYMRRKAQGKETDEDKELWENFIDRQL

SEQ ID NO: 4935 - protein, 161 aa, unidentified
  REGION 1..161: note = Description of Unknown: uncultivated organism with predicted taxonomy: Fibrobacter
  REGION 1..161: note = MG16-219 HNH domain
ELKQSKDERNTTFNNIAKRERENKGIAERIKNEYGLIPNRNKIEKYRLWEEAEQKCFYCGQTVNVKEFLSGFDVEVEHVIPKSLLFDNSYANKVCACRKCNANKGNKTAFDFMKSQSEDAFNNYVSRVEEYYKNGKISRTKHDRLLTPQSEIPSDFIERQL

SEQ ID NO: 4936 - protein, 177 aa, unidentified; identical to SEQ ID NO: 4932
  REGION 1..177: note = Description of Unknown: uncultivated organism with predicted taxonomy: Sediminibacterium sp. C3
  REGION 1..177: note = MG16-220 HNH domain

SEQ ID NO: 4937 - protein, 177 aa, unidentified
  REGION 1..177: note = Description of Unknown: uncultivated organism with predicted taxonomy: Sediminibacterium sp. C3
  REGION 1..177: note = MG16-221 HNH domain
ELKQSKDERNETFKRNSQNERNNKEYAERIKEYGLTPTRNRIMKMKMWEESEYTCVYCGQPVNVTEFLKGADVEREHIIPRGLLFDNSFTNQVCSCRLCNSKKGMRTAYDFIADDKGQAGLETYIDRINDLFNRKKISRSKFNRLLVSYKAYISRKAKGKETEEDKELWENFIDRQL

SEQ ID NO: 4938 - protein, 177 aa, unidentified
  REGION 1..177: note = Description of Unknown: uncultivated organism with predicted taxonomy: Prevotella sp. ne3005
  REGION 1..177: note = MG16-222 HNH domain
ELKQSKDERNETFKRNNQNERQNKEYAERIKKYSLTPTRNRIMKLKMWEESEHACMYCEEPVDPIEFLKGADVEREHIIPRGLLFDNSFTNQVCSCRRCNSKKGMRTAYDFIADDKGQEGLNAYIDRINDLFDKKKISRSKLNRLLVSHKAYISRKAQGKETEEDKELWENFIDRQL

SEQ ID NO: 4939 - protein, 177 aa, unidentified
  REGION 1..177: note = Description of Unknown: uncultivated organism with predicted taxonomy: Prevotella copri
  REGION 1..177: note = MG16-223 HNH domain
ELKQSKDERNETYRRNNQNEKKNNEYAERIKEYGLTPTRNRIMKMKMLEESEYKCMYCGQPVREKEFLQGADVEREHIIPKALLFDNSFTNQVCSCRSCNSQKGMRTAYDFIADDKGQEGLEAYIERINDLFNKKKISRSKLNRLLVSHKAYVSRKAQGKETEEDVQLWENFIDRQL

SEQ ID NO: 4940 - protein, 177 aa, unidentified
  REGION 1..177: note = Description of Unknown: uncultivated organism with predicted taxonomy: Bacteroides sp. CAG:770
  REGION 1..177: note = MG16-224 HNH domain
ELKQSKDERNEAFKRNNQNERQNKELAERIKNYGLTPTRNRIMKLKMWEESEHSCMYCKQPVDPIEFLKGADVEREHIIPRGLLFDNSFTNQVCSCRRCNSQKGMRTAYDFIADDKGQEGLNAYIEHINDLFEKKKISRSKLNRLLVSHKAYLSRKAQGRETEEDKELWENFIDRQL

SEQ ID NO: 4941 - protein, 160 aa, unidentified
  REGION 1..160: note = Description of Unknown: uncultivated organism with predicted taxonomy: Bacteroidales
  REGION 1..160: note = MG16-225 HNH domain
ELKQSKDERAQTTERINKNERENKAIEERIREHGIRPSRARIQKYKMWEESQHQCFYCGKSISAAEFLSGADVEVEHIIPKSILFDDSFSNKVCACRDCNHTKDNLTARDFMETRGQAELDAYLARVNTAFEEGRISKTKRDHLLWHKEEIPQDFIDRQL

SEQ ID NO: 4942 - protein, 160 aa, unidentified
  REGION 1..160: note = Description of Unknown: uncultivated organism
  REGION 1..160: note = MG16-226 HNH domain
ELKQSRDERKDAFDRNNENEKRNKKISALISEQGIRPSRSRIQKYKMWEESEHRCMYCGKVVNLSEFLNGADVEIEHIIPRSILFDDSFSNKVCACRDCNREKDNMTAMDYMASKPEGEFEAYKQRVDEAFNAHRISKTKRDHLLWRRADIPQAFIDRQL

SEQ ID NO: 4943 - protein, 160 aa, unidentified
  REGION 1..160: note = Description of Unknown: uncultivated organism with predicted taxonomy: Bacteroidales
  REGION 1..160: note = MG16-228 HNH domain
ELKSSKEEREAAFKRNNENERQNKIYEDRIREYGIRPSRSRIQKYKMWEESNHLCFYCGKPVNVTDFLAGAEVEIEHIIPQSVLFDDSYSNKVCACRTCNHTKGNQTAREFMETHSKAEYESYLLRVDDAFNAHRISKTKRDHLLWRKEDIPQDFIDRQL

SEQ ID NO: 4944 - protein, 160 aa, unidentified
  REGION 1..160: note = Description of Unknown: uncultivated organism with predicted taxonomy: Bacteroidales
  REGION 1..160: note = MG16-229 HNH domain
ELKSSKDEREAAFKRNNENERQNKIYEDRIREYGIRPSRSRIQKYKMWEESNHLCFYCGKPVNVTDFLAGAEVEIEHIIPQSVLFDDSYSNKVCACRTCNHTKGNQTAREFMETHSKAEYESYLLRVDDAFNAHRISKTKRDHLLWRKEDIPQDFIDRQL

SEQ ID NO: 4945 - protein, 160 aa, unidentified; identical to SEQ ID NO: 4741
  REGION 1..160: note = Description of Unknown: uncultivated organism with predicted taxonomy: Bacteroides sp. CAG:545
  REGION 1..160: note = MG16-230 HNH domain

SEQ ID NO: 4946 - protein, 160 aa, unidentified; identical to SEQ ID NO: 4798
  REGION 1..160: note = Description of Unknown: uncultivated organism with predicted taxonomy: Bacteroides sp. CAG:770
  REGION 1..160: note = MG16-231 HNH domain

SEQ ID NO: 4947 - protein, 160 aa, unidentified; identical to SEQ ID NO: 4741
  REGION 1..160: note = Description of Unknown: uncultivated organism with predicted taxonomy: Bacteroides sp. CAG:770
  REGION 1..160: note = MG16-232 HNH domain

SEQ ID NO: 4948 - protein, 160 aa, unidentified; identical to SEQ ID NO: 4741
  REGION 1..160: note = Description of Unknown: uncultivated organism with predicted taxonomy: Bacteroides sp. CAG:545
  REGION 1..160: note = MG16-233 HNH domain

SEQ ID NO: 4949 - protein, 160 aa, unidentified
  REGION 1..160: note = Description of Unknown: uncultivated organism with predicted taxonomy: Bacteroides sp. CAG:770
  REGION 1..160: note = MG16-234 HNH domain
ELKLSKEGRESAAKNIRAREKANEEIAKRIEELGLVPSKNKILKYRLWEESGKRCFYCGQPVSAAEFLNGLDVEIEHVIPKSLLFDDSFSNKVCACRKCNAEKDNATAFDFMKGRGENAFEDYLKRVETAFKENRISQTKKNRLLTPADKIPKDFISRQL

SEQ ID NO: 4950 - protein, 160 aa, unidentified; identical to SEQ ID NO: 4949
  REGION 1..160: note = Description of Unknown: uncultivated organism with predicted taxonomy: Bacteroides sp. CAG:770
  REGION 1..160: note = MG16-235 HNH domain

SEQ ID NO: 4951 - protein, 160 aa, unidentified; identical to SEQ ID NO: 4787
  REGION 1..160: note = Description of Unknown: uncultivated organism with predicted taxonomy: Bacteroides sp. CAG:770
  REGION 1..160: note = MG16-236 HNH domain

SEQ ID NO: 4952 - protein, 160 aa, unidentified; identical to SEQ ID NO: 4741
  REGION 1..160: note = Description of Unknown: uncultivated organism with predicted taxonomy: Bacteroides sp. CAG:770
  REGION 1..160: note = MG16-237 HNH domain

SEQ ID NO: 4953 - protein, 160 aa, unidentified; identical to SEQ ID NO: 4741
  REGION 1..160: note = Description of Unknown: uncultivated organism with predicted taxonomy: Bacteroides sp. CAG:545
  REGION 1..160: note = MG16-238 HNH domain

SEQ ID NO: 4954 - protein, 160 aa, unidentified; identical to SEQ ID NO: 4754
  REGION 1..160: note = Description of Unknown: uncultivated organism with predicted taxonomy: Bacteroides sp. CAG:770
  REGION 1..160: note = MG16-239 HNH domain

SEQ ID NO: 4955 - protein, 160 aa, unidentified; identical to SEQ ID NO: 4754
  REGION 1..160: note = Description of Unknown: uncultivated organism with predicted taxonomy: Bacteroides sp. CAG:709
  REGION 1..160: note = MG16-240 HNH domain

SEQ ID NO: 4956 - protein, 160 aa, unidentified; identical to SEQ ID NO: 4754
  REGION 1..160: note = Description of Unknown: uncultivated organism with predicted taxonomy: Bacteroides sp. CAG:770
  REGION 1..160: note = MG16-242 HNH domain

SEQ ID NO: 4957 - protein, 160 aa, unidentified
  REGION 1..160: note = Description of Unknown: uncultivated organism with predicted taxonomy: Bacteroides sp. CAG:709
  REGION 1..160: note = MG16-243 HNH domain
ELKLSKEGRAATAKNIRDREKENKEIAEKIIELGVTPSKNKILKYRLWQEAGQKCFYCGQPVGATEFLNGLDVEIEHVVPKTLLFDDSFSNKVCACRKCNAEKRNSTAYDYMKSKGENAFNDYLRRVDTAFSEHKISFTKRSRLLTPADKIPKDFISRQL

SEQ ID NO: 4958 - protein, 160 aa, unidentified
  REGION 1..160: note = Description of Unknown: uncultivated organism with predicted taxonomy: Bacteroidales
  REGION 1..160: note = MG16-245 HNH domain
ELKQSREERDNAYKAINKNERENAAIAAKIAEFGIRPSRSRIQKYKMWEESNHRCFYCGKTMDIAQFLNGADVEIEHIIPRSILFDDSYSNKVCACRDCNREKDNATAMEYMAGKPTGEFEAYKQRVDEAFTEHRISKTKRDHLLWRRADIPQDFIERQL

SEQ ID NO: 4959 - protein, 177 aa, unidentified
  REGION 1..177: note = Description of Unknown: uncultivated organism with predicted taxonomy: Bacteroides sp. CAG:770
  REGION 1..177: note = MG16-246 HNH domain
ELKQSKDERNEAFKRNNQNERQNKEYAERIKEYGLTPTRNRIMKMKMWEESEYTCMYCGQPVNVTEFLQGADVEREHIIPRALLFDNSFTNQVCSCRRCNSQKGMRTAYDFIEDDKGQEGLNAYIERINDLFNRKKISRSKFNRLLVSHKAYISRKAQGKETEENKELWENFIDRQL

SEQ ID NO: 4960 - protein, 160 aa, unidentified
  REGION 1..160: note = Description of Unknown: uncultivated organism with predicted taxonomy: Porphyromonas sp. oral taxon 278
  REGION 1..160: note = MG16-247 HNH domain
ELKQSRDERDSAYKAINKNERENAAIAAKIAEFGIRSSRSRIQKYKMWEESSHRCFYCGKTMDITQFLSGADVEIEHIIPRSILFDDSFSNKVCACRECNREKGNMTAMEYMEHKPAGEFEAYKQRVDEAFTDHRISKTKRDHLLWRRADIPQDFIDRQL

SEQ ID NO: 4961 - protein, 160 aa, unidentified
  REGION 1..160: note = Description of Unknown: uncultivated organism with predicted taxonomy: Coprobacter sp.
  REGION 1..160: note = MG16-248 HNH domain
ELKQSREERDSAYKAINKNERDNAAIAAKIAEFGVRPSRSRIQKYKMWEESNHRCFYCGKIMDITQFLNGADVEIEHIIPRSILFDDSYSNKVCACRDCNHEKDNSTAMEYMESKPAGEFEAYKQRVDEAFSAHRISKTKRDHLLWRRGDIPQDFIERQL

SEQ ID NO: 4962 - protein, 160 aa, unidentified; identical to SEQ ID NO: 4871
  REGION 1..160: note = Description of Unknown: uncultivated organism with predicted taxonomy: Bacteroides sp. CAG:144
  REGION 1..160: note = MG16-249 HNH domain

SEQ ID NO: 4963 - protein, 177 aa, unidentified
  REGION 1..177: note = Description of Unknown: uncultivated organism with predicted taxonomy: Sediminibacterium sp. C3
  REGION 1..177: note = MG16-250 HNH domain
ELKQSKDERNETFKRNNQNERQNKEYAERIKEYGLTPTRNRIIKMKMWEESEYTCMYCGQPVNVTEFLKGADVEREHIIPRGLLFDNSFTNQVCSCRRCNSKKGMRTAYDFIADDKGQEGLNAYIDRINNLFDKKKISRSKLNRLLVSHKAYISRKAQGKETEEDKELWENFIDRQL

SEQ ID NO: 4964 - protein, 174 aa, unidentified
  REGION 1..174: note = Description of Unknown: uncultivated organism with predicted taxonomy: Bacteroides sp. CAG:144
  REGION 1..174: note = MG16-251 HNH domain
ELKQSKEEREETERGIRKQQKANDGYAKLLKEGGVRPTRNRILKYRLWRESNETCFYCGQPINFNEFLKFSDVEREHVIPKKLLFDDSFANQVCSCRKCNAEKGGRTAFDYMRTKQNLQDYLDKVDKMFQEHKIGGKKHSHLLASYDDYLSRKKEGKETKDDVKIWEEPIERQL

SEQ ID NO: 4965 - protein, 160 aa, unidentified
  REGION 1..160: note = Description of Unknown: uncultivated organism with predicted taxonomy: Bacteroidales
  REGION 1..160: note = MG16-252 HNH domain
ELKQSRDERNDAYLSINKRERENKVIEERIREYGISPSKSRIQKYRLWEESNHLCFYCGHPVGAAEFLSGSGVEIEHIIPRSLLFDDSFANKVCACRKCNAEKGNSTAFDYMKSKPANDFEDYLKRVEKYFTEKRISKTKRERLLTPASEIPQDFIDRQL

SEQ ID NO: 4966 - protein, 174 aa, unidentified
  REGION 1..174: note = Description of Unknown: uncultivated organism
  REGION 1..174: note = MG16-253 HNH domain
ELKQSKEEREETDKGIRKQQKANEEYADILKKKGVRPTRNRILKYRLWKESEEACFYCGRDIDFHEFLRFSDVEREHVIPKKLLFDDSFANQVCSCRRCNAEKGGRTALDYMRTKPNLQEYLDKVDKLFQEHKIGGKKHAHLLASYDDYLSRKKEGKETKDDIMIWEEPIDRQL

SEQ ID NO: 4967 - protein, 160 aa, unidentified
  REGION 1..160: note = Description of Unknown: uncultivated organism with predicted taxonomy: Marinilabiliaceae
  REGION 1..160: note = MG16-254 HNH domain
ELKQSRDERESAYKAMGQNERRNKEIAEKISEFGIRPSRSRIQKYKMWEESLHQCFYCGKTIDLSEFLNGADVEIEHIIPRSILFDDSFSNKVCACRRCNQEKGNQTAMEYMETKSAAEQEAYKQRVDEAFTAKRISKTKRDHLLWRKTDIPADFIERQL

SEQ ID NO: 4968 - protein, 175 aa, unidentified
  REGION 1..175: note = Description of Unknown: uncultivated organism with predicted taxonomy: Bacteroidetes
  REGION 1..175: note = MG16-255 HNH domain
ELKRSKDEREMANIRMNRNKRRNDEIASIIQNEYGLIPTKNRIMKYKMWEETDGFCIYCGTKIKLAEFLGGVDSEREHIIPKSLLFDDSFSNQSCACRKCNKEKGNRTALDYMRDIGKEKQYVEHIAELLEKDKISKTKYSNLLASYKDYLERKAKGKETEEDKNLWENFIDRQL

SEQ ID NO: 4969 - protein, 174 aa, unidentified
  REGION 1..174: note = Description of Unknown: uncultivated organism with predicted taxonomy: Bacteroides sp. CAG:144
  REGION 1..174: note = MG16-256 HNH domain
ELKQSKEEREETERGIRKQQKANDEYAKLLKEGGVRPTRNRILKYRLWRESNETCFYCGQPINFNEFLKFSDVEREHVIPKKLLFDDSFANQVCSCRKCNAEKGGRTAFDYMRTKQNLQDYLDKVDKMFQEHKIGGKKHSHLLASYDDYLSRKKEGKETKDDVKIWEEPIERQL

SEQ ID NO: 4970 - protein, 160 aa, unidentified
  REGION 1..160: note = Description of Unknown: uncultivated organism with predicted taxonomy: Bacteroidia
  REGION 1..160: note = MG16-257 HNH domain
ELKQSREEREGAYRRNNQNERLNKEIFAKIEEMGIRPSRSRIQKYKMWEESNHRCMYCGKTVSLAEFLNGAEVEIEHIIPRSILFDDSFSNKVCACRECNHEKGNLTALDYLETKPTAEQEAYKQRVDEAFKEGRISKTKRDHLLWHRSDIPTDFIDRQL

SEQ ID NO: 4971 - protein, 160 aa, unidentified; identical to SEQ ID NO: 4960
  REGION 1..160: note = Description of Unknown: uncultivated organism with predicted taxonomy: Bacteroidales
  REGION 1..160: note = MG16-258 HNH domain

SEQ ID NO: 4972 - protein, 160 aa, unidentified; identical to SEQ ID NO: 4856
  REGION 1..160: note = Description of Unknown: uncultivated organism with predicted taxonomy: Prevotella saccharolytica
  REGION 1..160: note = MG16-259 HNH domain

SEQ ID NO: 4973 - protein, 175 aa, unidentified; identical to SEQ ID NO: 4968
  REGION 1..175: note = Description of Unknown: uncultivated organism with predicted taxonomy: Bacteroides sp. CAG:770
  REGION 1..175: note = MG16-260 HNH domain

SEQ ID NO: 4974 - protein, 161 aa, unidentified
  REGION 1..161: note = Description of Unknown: uncultivated organism with predicted taxonomy: Bacteroidales
  REGION 1..161: note = MG16-261 HNH domain
ELKQSKDERNTTFNNIAKRERENKGIAERIKNEYGLIPNRNKIEKFRLCEESDHKCFYCGQAVNAKEFLLGSDVEVEHVIPKSLLFDDSFANKVCACRKCNAQKGNKTAFDFMKSQSEDEFNNYVSRVEEYYKNGKISRTKHDRLLTPQTEIPSDFIERQL

SEQ ID NO: 4975 - protein, 177 aa, unidentified
  REGION 1..177: note = Description of Unknown: uncultivated organism with predicted taxonomy: Porphyromonas catoniae
  REGION 1..177: note = MG16-262 HNH domain
ELKQSKDERNETFKRNNQNERQNKEYAGRIKEYGLTPTRNRIMKMKMWEESEYTCMYCGQPVNVTEFLKGADVEREHIIPKSLLFDNSFTNQVCSCRRCNSKKGMRTAYDFIADDKGQEGLNAYIDRINNLFDKKKISRSKFNRLLVSHKAYISRKAQGKETEEDIELWENFIDRQL

SEQ ID NO: 4976 - protein, 177 aa, unidentified
  REGION 1..177: note = Description of Unknown: uncultivated organism with predicted taxonomy: Sediminibacterium sp. C3
  REGION 1..177: note = MG16-263 HNH domain
ELKQSKDERNETFRRNSQNEKKNKEFAEHIKEYNLTPTRNRILKWKLYEESDHSCMYCGQSINIRDFLQGADAEREHIVPRGLLFDNSFTNQVCACRSCNSKKGMRTAYDFIEDEKGEEGLHSYIEHINYLFNKKNISRSKFNRLLVSHKAYLKRKALGKETEEDKELWENFIDRQL

SEQ ID NO: 4977 - protein, 197 aa, unidentified
  REGION 1..197: note = Description of Unknown: uncultivated organism
  REGION 1..197: note = MG16-264 HNH domain
ELKQSKDDRNTTFLQNEAMEKLNEAIAKRLTSEGITPTKRIMEKYKFIFPTKGCIDKKTGKFVTKNFDALATVNQCIYCGKPFSLSAALNGEGYEIEHIIPRDMICDNSQSNKVLSCRSCNSKKSNKTEFDFMRSQDKAVFDDYIKRVEKWFDDGIISPSKRERLLLSHEDYLERKKKGKTTEEDKKYWEEFVSRQA

SEQ ID NO: 4978 - protein, 177 aa, unidentified
  REGION 1..177: note = Description of Unknown: uncultivated organism
  REGION 1..177: note = MG16-265 HNH domain
ELKQSKDERNETFKRNSQNERKNKEYAERIKEYGLTPTRNRIMKMKMWEESEHSCMYCGQPVDVKEFLQGADVEREHIVPRGLLFDNSFTNQVCSCRRCNSQKGMRTAYDFIEDDKGEAGLNSYIEHINYLFDKKQISRNKFNRLLVSHKAYINRKAQGKETEEDKELWENFIDRQL

SEQ ID NO: 4979 - protein, 160 aa, unidentified; identical to SEQ ID NO: 4909
  REGION 1..160: note = Description of Unknown: uncultivated organism with predicted taxonomy: Porphyromonas sp. oral taxon 278
  REGION 1..160: note = MG16-266 HNH domain

SEQ ID NO: 4980 - protein, 177 aa, unidentified
  REGION 1..177: note = Description of Unknown: uncultivated organism
  REGION 1..177: note = MG16-267 HNH domain
HLNKNKYQRNETFKRNNQNERQNKEYAGRIKEYGLTPTRNRIMKMKMWEESEYTCMYCGQPVNVTEFLKGADVEREHIIPKSLLFDNSFTNQVCSCRRCNSKKGMRTAYDFIADDKGQEGLNAYIDRINNLFDKKKISRSKFNRLLVSHKAYISRKAQGKETEEDIELWENFIDRQL

SEQ ID NO: 4981 - protein, 174 aa, unidentified
  REGION 1..174: note = Description of Unknown: uncultivated organism with predicted taxonomy: Prevotella
  REGION 1..174: note = MG16-268 HNH domain
ELKMDRESRHRKFTQNNSRKRQNEEYADKINEHGIIPTRNRVIKYRLWEEANMQCFYCGQPINITELLRDPTIEKEHIIPKALLLDNSYSNLVCSCRKCNQEKGARTAYDYMRQKSDLDAYIKRINKLAETQKISQTKRLHLLASYEDYLVRKRLGKATEEDRNLWEEFINRQL

SEQ ID NO: 4982 - protein, 177 aa, unidentified; identical to SEQ ID NO: 4932
  REGION 1..177: note = Description of Unknown: uncultivated organism with predicted taxonomy: Bacteroidales
  REGION 1..177: note = MG16-269 HNH domain

SEQ ID NO: 4983 - protein, 160 aa, unidentified
  REGION 1..160: note = Description of Unknown: uncultivated organism with predicted taxonomy: Bacteroidales
  REGION 1..160: note = MG16-270 HNH domain
ELKQSREERDNAYKAINKNERENAAIAAKIAEFGIRPSRSRIQKYKMWEESNHRCFYCGKTMDIAQFLNGADVEIEHIIPRSILFDDSYSNKVCACRDCNREKGNSTAMEYMEGKPTGEFEAYKQRVDEAFTEHRISKTKRDHLLWRRADIPQDFIERQL

SEQ ID NO: 4984 - protein, 160 aa, unidentified
  REGION 1..160: note = Description of Unknown: uncultivated organism with predicted taxonomy: Bacteroidales
  REGION 1..160: note = MG16-271 HNH domain
ELKQNKEERETTYKNNSKNERLNREITERIKEMGIRPSRMRVQKYKLWEESLHQCFYCGKTVGAAEFLSGADVEIEHIIPRSVLFDDSYSNKVCACRECNHAKNNQTAFDFMKAQSTDKFEAYKSRVDDAFKEKRISKTKRDHLLWGLEDIPQDFIDRQL

SEQ ID NO: 4985 - protein, 177 aa, unidentified
  REGION 1..177: note = Description of Unknown: uncultivated organism with predicted taxonomy: Bacteroides sp. CAG:770
  REGION 1..177: note = MG16-272 HNH domain
ELKQSKDERNEAFKRNNQNERQNKDYAERIKEYGLTPTRNRIMKMRMWEESEYTCMYCGQPVNVTEFLKGADVEREHIIPRGLLFDNSFTNQVCSCRRCNSKKGMRTAYDFIADEKGQEGLDTYIDRINDLFNRKKISRSKLNRLFVSYKAYMSRKAQGKETDEDKDLWENFIDRQL

SEQ ID NO: 4986 - protein, 177 aa, unidentified
  REGION 1..177: note = Description of Unknown: uncultivated organism with predicted taxonomy: Bacteroidetes
  REGION 1..177: note = MG16-273 HNH domain
ELKQSKDERNETFKRNNQNERQNKEYAERIKKYGLTPTRNRIMKLKMWEESEHACMYCEQPVDPIEFLKGADVEREHIIPRGLLFDNSFTNQVCSCRRCNSKKGMRTAYDFIADDKGQEGLNAYIEHINDLFDKKKISRSKLNRLLVSHKAYISRKAQGKETEEDKELWENFIDRQL

SEQ ID NO: 4987 - protein, 174 aa, unidentified
  REGION 1..174: note = Description of Unknown: uncultivated organism with predicted taxonomy: Bacteroidales
  REGION 1..174: note = MG16-274 HNH domain
ELKQSKEEREETDKGIRKQQKANEEYADILKKKGVRPTRNRILKYRLWKESEEACFYCGRDIDFHEFLRFSDIEREHVIPKKLLFDDSFANQVCSCRRCNAEKGGRTALDYMRTKPNLQEYLDKVDKMFQEHKIGGKKHTHLLASYDDYLSRKKEGKETKDDILIWEEPIDRQL

SEQ ID NO: 4988 - protein, 197 aa, unidentified
  REGION 1..197: note = Description of Unknown: uncultivated organism with predicted taxonomy: Bacteroidetes
  REGION 1..197: note = MG16-275 HNH domain
ELKQSKDDRNTTFLQNEAMEKLNEAIAKRLTSEGITPTKRIMEKYKFIFPTKGCIDKKTGKFVTKNFDALATVNQCIYCGKPFSLSAALNGEGYEIEHIIPRDMICDNSQSNKVLSCRSCNSKKSNKTAFDFMRSQDKAMFDDYIKRVEKWFDDGIISPSKRERLLLSHEDYMERKKKGKTTEEDKKYWEEFVSRQA

SEQ ID NO: 4989 - protein, 162 aa, unidentified
  REGION 1..162: note = Description of Unknown: uncultivated organism with predicted taxonomy: Clostridiales
  REGION 1..162: note = MG18-1 HNH domain
GVSPEQKNKRTVSRKDQLLALYKACKEDARDWCGELEALPEDKLRSDKLYLYYTQMGRCMYSGEPIRLDDLMHDTANQLYDIDHIYPQSKTKDDSLTNRVLVKRQLNAIKSNDYPLPQTMRQTALWKALLEKGLISKQKYLRLTRTTPFTEEELAGFINRQL

SEQ ID NO: 4990 - protein, 168 aa, unidentified
  REGION 1..168: note = Description of Unknown: uncultivated organism with predicted taxonomy: Phascolarctobacterium succinatutens
  REGION 1..168: note = MG18-3 HNH domain
SKEESKRTDSRLKKLQDLYKKCREENIDFMPRKDEFNALKTQLSSKKEDDLRSDKLYLYYTQMGRCMYTGERIELASLYDNNLYDIDHIYPRSKTKDDSLSNRVLVKKQVNAAKTDTYPLDAAIRIKMHSFWKLLYDKGFIDERKYERLTRSTQLRDEELAGFISRQL

SEQ ID NO: 4991 - protein, 168 aa, unidentified
  REGION 1..168: note = Description of Unknown: uncultivated organism with predicted taxonomy: Phascolarctobacterium succinatutens
  REGION 1..168: note = MG18-4 HNH domain
SKEESKRTDSRLKKLQDLYKKCREENIDFMPHTDELNAFKIQLSSKKEDDLRSDKLYLYYTQMGRCMYTGERIELASLYNDNLYDIDHIYPRSKTKDDSLSNRVLVKKEVNAAKTDIYPLDAAIRTKMHSFWKLLYDKGFIDERKYERLTRSTQLRDEELAGFISRQL

SEQ ID NO: 4992 - protein, 168 aa, unidentified
  REGION 1..168: note = Description of Unknown: uncultivated organism with predicted taxonomy: Phascolarctobacterium succinatutens
  REGION 1..168: note = MG18-5 HNH domain
SKEESKRTDSRLKKLQDLYKKCREENIDFMPRKDEFNTLKTQLSSKKEDDLRIDKLYLYYTQMGRCMYTGEKIELASLYDNNLYDIDHIYPRSKTKDDSLSNRVLVKKQVNAAKTDTYPLDAAIRTKMHSFWKLLYDKGFIDERKYERLTRSTQLRDEELAGFISRQL

SEQ ID NO: 4993 - protein, 168 aa, unidentified; identical to SEQ ID NO: 4990
  REGION 1..168: note = Description of Unknown: uncultivated organism with predicted taxonomy: Phascolarctobacterium
  REGION 1..168: note = MG18-6 HNH domain

SEQ ID NO: 4994 - protein, 168 aa, unidentified
  REGION 1..168: note = Description of Unknown: uncultivated organism with predicted taxonomy: Acidaminococcales
  REGION 1..168: note = MG18-7 HNH domain
SKEESLRTNSRLQRLQDLYKKCKEENIDFMPKADELTDIRSQLQCKNEEDLRSDKLYLYYTQMGRCMYTGERIELASLYDQNKYDVDHIYPRSKTKDDSLNNRVLVKKEINSAKTDNYPIDADIRKKMHAFWKMLYDKGFIDQKKYERLTRSTQLTDEELAGFINRQL

SEQ ID NO: 4995 - protein, 168 aa, unidentified
  REGION 1..168: note = Description of Unknown: uncultivated organism
  REGION 1..168: note = MG18-8 HNH domain
SKEESKRTDSRLKKLQDLYKKCKEENIDFVPRKDEFNALKTQLSSKKEDDLRSDKLYLYYTQMGRCMYTGERIELASLYDNNLYDIDHIYPRSKTKDDSLSNRVLVKKQVNAAKTDTYPLDAAIRIKMHSFWKLLYDKGFIDERKYERLTRSTQLRDEELAGFISRQL

SEQ ID NO: 4996 - protein, 168 aa, unidentified
  REGION 1..168: note = Description of Unknown: uncultivated organism with predicted taxonomy: Phascolarctobacterium succinatutens
  REGION 1..168: note = MG18-9 HNH domain
SKEESKRTDSRLKKLQDLYKKCREENIDFMPRKDEFNTLKTQLNSKKEDDLRSDKLYLYYTQMGRCMYTGEKIELASLYDNNLYDIDHIYPRSKTKDDSLSNRVLVKKQVNAAKTDTYPLDAAIRTKMHSFWKLLYDKGFIDERKYQRLTRSTQLRDEELAGFISRQL

SEQ ID NO: 4997 - protein, 168 aa, unidentified; identical to SEQ ID NO: 4996
  REGION 1..168: note = Description of Unknown: uncultivated organism with predicted taxonomy: Phascolarctobacterium
  REGION 1..168: note = MG18-10 HNH domain

SEQ ID NO: 4998 - protein, 168 aa, unidentified
  REGION 1..168: note = Description of Unknown: uncultivated organism with predicted taxonomy: Phascolarctobacterium succinatutens
  REGION 1..168: note = MG18-11 HNH domain
SKEESKRTDSRLKKLQDLYKKCREENIDFMPRKDEFNALKTQLSSKKEEDLRSDKLYLYYTQMGRCMYTGERIELASLYDNNLYDIDHIYPRSKTKDDSLSNRVLVKKQVNAAKTDTYPLDAAIRTKMHSFWKLLYDKGFIDERKYERLTRSTQLRDEELAGFISRQL

SEQ ID NO: 4999 - protein, 168 aa, unidentified
  REGION 1..168: note = Description of Unknown: uncultivated organism with predicted taxonomy: Phascolarctobacterium succinatutens
  REGION 1..168: note = MG18-12 HNH domain
SKEESKRTDSRLKKLQDLYKKCKEENIDFMPRKDEFNALKTQLSSKKEDDLRSDKLYLYYTQMGRCMYTGERIELASLNDNNLYDIDHIYPRSKTKDDSLSNRVLVKKQVNAAKTDTYPLDAAIRIKMHSFWKLLYDKGFIDERKYERLTRSTQLRDEELAGFISRQL

SEQ ID NO: 5000 - protein, 168 aa, unidentified; identical to SEQ ID NO: 4991
  REGION 1..168: note = Description of Unknown: uncultivated organism with predicted taxonomy: Phascolarctobacterium succinatutens
  REGION 1..168: note = MG18-13 HNH domain

SEQ ID NO: 5001 - protein, 168 aa, unidentified; identical to SEQ ID NO: 4996
  REGION 1..168: note = Description of Unknown: uncultivated organism with predicted taxonomy: Phascolarctobacterium
  REGION 1..168: note = MG18-14 HNH domain

SEQ ID NO: 5002 - protein, 168 aa, unidentified
  REGION 1..168: note = Description of Unknown: uncultivated organism with predicted taxonomy: Phascolarctobacterium succinatutens
  REGION 1..168: note = MG18-15 HNH domain
SKEESKRTDSRLKKLQDLYKKCREENIDFMPRKDEFNVLKTQLSSKNEEDLRSDKLYLYYTQMGRCMYTGEIIELASLYDNNLYDIDHIYPRSKTKDDSLSNRVLVKKQVNAAKTDIYPLDAAIRTKMHSFWKLLYDKGFIDERKYERLTRSMQLRDEELAGFISRQL

SEQ ID NO: 5003 - protein, 168 aa, unidentified; identical to SEQ ID NO: 4999
  REGION 1..168: note = Description of Unknown: uncultivated organism with predicted taxonomy: Phascolarctobacterium succinatutens
  REGION 1..168: note = MG18-16 HNH domain

SEQ ID NO: 5004 - protein, 168 aa, unidentified; identical to SEQ ID NO: 4996
  REGION 1..168: note = Description of Unknown: uncultivated organism with predicted taxonomy: Phascolarctobacterium
  REGION 1..168: note = MG18-17 HNH domain

SEQ ID NO: 5005 - protein, 168 aa, unidentified; identical to SEQ ID NO: 4996
  REGION 1..168: note = Description of Unknown: uncultivated organism with predicted taxonomy: Phascolarctobacterium succinatutens
  REGION 1..168: note = MG18-18 HNH domain

SEQ ID NO: 5006 - protein, 168 aa, unidentified; identical to SEQ ID NO: 4996
  REGION 1..168: note = Description of Unknown: uncultivated organism with predicted taxonomy: Phascolarctobacterium
  REGION 1..168: note = MG18-19 HNH domain

SEQ ID NO: 5007 - protein, 168 aa, unidentified; identical to SEQ ID NO: 4996
  REGION 1..168: note = Description of Unknown: uncultivated organism with predicted taxonomy: Phascolarctobacterium
  REGION 1..168: note = MG18-20 HNH domain

SEQ ID NO: 5008 - protein, 168 aa, unidentified; identical to SEQ ID NO: 4996
  REGION 1..168: note = Description of Unknown: uncultivated organism with predicted taxonomy: Phascolarctobacterium
  REGION 1..168: note = MG18-21 HNH domain

SEQ ID NO: 5009 - protein, 168 aa, unidentified; identical to SEQ ID NO: 4991
  REGION 1..168: note = Description of Unknown: uncultivated organism with predicted taxonomy: Phascolarctobacterium
  REGION 1..168: note = MG18-22 HNH domain

SEQ ID NO: 5010 - protein, 168 aa, unidentified
  REGION 1..168: note = Description of Unknown: uncultivated organism with predicted taxonomy: Phascolarctobacterium succinatutens
  REGION 1..168: note = MG18-23 HNH domain
SKEESKRTDSRLKKLQDLYKKCREENIDFMPRKDEFNALKTQLSSKKEEDLRSDKLYLYYTQMGRCMYTGERIELASLYDNNLYDIDHIYPRSKTKDDSLSNRVLVKKQINAAKTDTYPLDAAIRTKMHSFWKLLYDKGFIDERKYERLTRSTQLRDEELAGFISRQL

SEQ ID NO: 5011 - protein, 168 aa, unidentified
  REGION 1..168: note = Description of Unknown: uncultivated organism with predicted taxonomy: Phascolarctobacterium
  REGION 1..168: note = MG18-24 HNH domain
SKEESKRTDSRLKKLQDLYKKCREENIDFMPRKDEFNALKTQLSSKKEENLRSDKLYLYYTQMGRCMYTGERIELASLYDNNLYDIDHIYPRSKTKDDSLSNRVLVKKQVNAAKTDTYPLDAAIRTKMHSFWKLLYDKGFIDERKYERLTRSTQLRDEELAGFISRQL

SEQ ID NO: 5012 - protein, 168 aa, unidentified; identical to SEQ ID NO: 4996
  REGION 1..168: note = Description of Unknown: uncultivated organism with predicted taxonomy: Phascolarctobacterium succinatutens
  REGION 1..168: note = MG18-25 HNH domain

SEQ ID NO: 5013 - protein, 168 aa, unidentified; identical to SEQ ID NO: 4996
  REGION 1..168: note = Description of Unknown: uncultivated organism with predicted taxonomy: Phascolarctobacterium succinatutens
  REGION 1..168: note = MG18-26 HNH domain

SEQ ID NO: 5014 - protein, 168 aa, unidentified; identical to SEQ ID NO: 5011
  REGION 1..168: note = Description of Unknown: uncultivated organism with predicted taxonomy: Phascolarctobacterium succinatutens
  REGION 1..168: note = MG18-27 HNH domain

SEQ ID NO: 5015 - protein, 168 aa, unidentified
  REGION 1..168: note = Description of Unknown: uncultivated organism with predicted taxonomy: Phascolarctobacterium
  REGION 1..168: note = MG18-28 HNH domain
SKEESKRTDSRLKKLQDLYKKCREENIDFMPRKDEFNALKTQLSSKKEEDLRSDKLYLYYTQMGRCMYTGERIELASLYDNNLYDIDHIYPRSKTKDDSLSNRVLVKKQVNAAKTDIYPLDAAIRTKMHSFWKLLYDKGFIDERKYERLTRSTQLRDEELAGFISRQL

SEQ ID NO: 5016 - protein, 168 aa, unidentified
  REGION 1..168: note = Description of Unknown: uncultivated organism with predicted taxonomy: Phascolarctobacterium succinatutens
  REGION 1..168: note = MG18-29 HNH domain
SKEESKRTDSRLKKLQDLYKKCREENIDFMPRKDEFNTLKTQLSSKKEDDLRSDKLYLYYTQMGRCMYTGEKIELASLYDNNLYDIDHIYPRSKTKDDSLSNRVLVKKQVNAAKTDTYPLDAAIRTKMHSFWKLLYDKGFIDERKYQRLTRSTQLRDEELAGFISRQL

SEQ ID NO: 5017 - protein, 168 aa, unidentified
  REGION 1..168: note = Description of Unknown: uncultivated organism with predicted taxonomy: Phascolarctobacterium succinatutens
  REGION 1..168: note = MG18-30 HNH domain
SKEESKRTDSRLKKLQDLYKKCREENIDFMPRKDEFNALKTQLSSKKEEDLRSDKLYLYYTQMGRCMYTGERIELASLYDDNLYDIDHIYPRSKTKDDSLSNRVLVKKEVNAAKTDIYPLDAAIRTKMHSFWKLLYDKGFIDERKYERLTRSTQLRDEELAGFISRQL

SEQ ID NO: 5018 - protein, 168 aa, unidentified; identical to SEQ ID NO: 5017
  REGION 1..168: note = Description of Unknown: uncultivated organism with predicted taxonomy: Phascolarctobacterium succinatutens
  REGION 1..168: note = MG18-31 HNH domain

SEQ ID NO: 5019 - protein, 168 aa, unidentified
  REGION 1..168: note = Description of Unknown: uncultivated organism with predicted taxonomy: Phascolarctobacterium succinatutens
  REGION 1..168: note = MG18-32 HNH domain
SKEESKRTDSRLKKLQDLYKQCREENIDFMPRKDEFNTLKTQLSSKKEDDLRIDKLYLYYTQMGRCMYTGEIIELASLYDNNLYDIDHIYPRSKTKDDSLSNRVLVKKQVNAAKTDIYPLDAAIRTKMHSFWKLLYDKGFIDERKYERLTRSTQLRDEELAGFISRQL

SEQ ID NO: 5020 - protein, 168 aa, unidentified; identical to SEQ ID NO: 4996
  REGION 1..168: note = Description of Unknown: uncultivated organism with predicted taxonomy: Phascolarctobacterium succinatutens
  REGION 1..168: note = MG18-33 HNH domain

SEQ ID NO: 5021 - protein, 168 aa, unidentified; identical to SEQ ID NO: 4996
  REGION 1..168: note = Description of Unknown: uncultivated organism with predicted taxonomy: Phascolarctobacterium succinatutens
  REGION 1..168: note = MG18-34 HNH domain

SEQ ID NO: 5022 - protein, 168 aa, unidentified; identical to SEQ ID NO: 4999
  REGION 1..168: note = Description of Unknown: uncultivated organism with predicted taxonomy: Phascolarctobacterium succinatutens
  REGION 1..168: note = MG18-35 HNH domain

SEQ ID NO: 5023 - protein, 168 aa, unidentified; identical to SEQ ID NO: 4996
  REGION 1..168: note = Description of Unknown: uncultivated organism with predicted taxonomy: Phascolarctobacterium succinatutens
  REGION 1..168: note = MG18-36 HNH domain

SEQ ID NO: 5024 - protein, 168 aa, unidentified; identical to SEQ ID NO: 5011
  REGION 1..168: note = Description of Unknown: uncultivated organism with predicted taxonomy: Phascolarctobacterium succinatutens
  REGION 1..168: note = MG18-37 HNH domain

SEQ ID NO: 5025 - protein, 168 aa, unidentified; identical to SEQ ID NO: 5017
  REGION 1..168: note = Description of Unknown: uncultivated organism with predicted taxonomy: Phascolarctobacterium
  REGION 1..168: note = MG18-38 HNH domain

SEQ ID NO: 5026 - protein, 168 aa, unidentified
  REGION 1..168: note = Description of Unknown: uncultivated organism with predicted taxonomy: Phascolarctobacterium
  REGION 1..168: note = MG18-39 HNH domain
SKEESKRTDSRLKKLQDLYKKCREENIDFMPRKDEFNTLKTQLSSKKEDDLRIDKLYLYYTQMGRCMYTGEKIELASLYDNNLYDIDHIYPRSKTKDDSLSNRVLVKKQVNAAKTDTYPLDAAIRTKMHSFWKLLYDKGFIDERKYQRLTRSTQLRDEELAGFISRQL

SEQ ID NO: 5027 - protein, 168 aa, unidentified; identical to SEQ ID NO: 5016
  REGION 1..168: note = Description of Unknown: uncultivated organism with predicted taxonomy: Phascolarctobacterium succinatutens
  REGION 1..168: note = MG18-40 HNH domain

SEQ ID NO: 5028 - protein, 168 aa, unidentified
  REGION 1..168: note = Description of Unknown: uncultivated organism with predicted taxonomy: Phascolarctobacterium succinatutens
  REGION 1..168: note = MG18-41 HNH domain
SKEESKRTDSRLKKLQDLYKKCREENIDFMPRKDEFNALKIQLNSKKDYDLRSDKLYLYYTQMGRCMYTGERIELASLYDDNLYDIDHIYPRSKTKDDSLSNRVLVKKEVNAAKTDIYPLDAAIRTKMHSFWKLLYDKGLIDERKYERLTRSTQLRDEELAGFISRQL

SEQ ID NO: 5029 - protein, 168 aa, unidentified; identical to SEQ ID NO: 4990
  REGION 1..168: note = Description of Unknown: uncultivated organism with predicted taxonomy: Phascolarctobacterium succinatutens
  REGION 1..168: note = MG18-42 HNH domain

SEQ ID NO: 5030 - protein, 168 aa, unidentified; identical to SEQ ID NO: 4999
  REGION 1..168: note = Description of Unknown: uncultivated organism with predicted taxonomy: Phascolarctobacterium succinatutens
  REGION 1..168: note = MG18-43 HNH domain

SEQ ID NO: 5031 - protein, 168 aa, unidentified; identical to SEQ ID NO: 5002
  REGION 1..168: note = Description of Unknown: uncultivated organism with predicted taxonomy: Phascolarctobacterium succinatutens
  REGION 1..168: note = MG18-44 HNH domain

SEQ ID NO: 5032 - protein, 168 aa, unidentified; identical to SEQ ID NO: 5011
  REGION 1..168: note = Description of Unknown: uncultivated organism with predicted taxonomy: Phascolarctobacterium succinatutens
  REGION 1..168: note = MG18-45 HNH domain

SEQ ID NO: 5033 - protein, 168 aa, unidentified
  REGION 1..168: note = Description of Unknown: uncultivated organism with predicted taxonomy: Phascolarctobacterium
  REGION 1..168: note = MG18-46 HNH domain
SKEESKRTDSRLKKLQDLYKKCKEENIDFMPRKDEFNALKTQLSSKKEDDLRSDKLYLYYTQMGRCMYTGERIELASLYDNNLYDIDHIYPRSKTKDDSLSNRVLVKKQVNAAKTDTYPLDAAIRTKMHSFWKLLYDKGFIDERKYERLTRSTQLRDEELAGFISRQL

SEQ ID NO: 5034 - protein, 168 aa, unidentified; identical to SEQ ID NO: 4994
  REGION 1..168: note = Description of Unknown: uncultivated organism with predicted taxonomy: Phascolarctobacterium
  REGION 1..168: note = MG18-47 HNH domain

SEQ ID NO: 5035 - protein, 168 aa, unidentified
  REGION 1..168: note = Description of Unknown: uncultivated organism with predicted taxonomy: Phascolarctobacterium succinatutens
  REGION 1..168: note = MG18-48 HNH domain
SKEESKRTDSRLKKLQDLYKKCREENIDFMPRKDEFNALKTQLSSKKEENLRSDKLYLYYTQMGRCMYTGERIELASLDDNNLYDIDHIYPRSKTKDDSLSNRVLVKKQVNAAKTDTYPLDAAIRTKMHSFWKLLYDKGFIDERKYERLTRSTQLRDEELAGFISRQL

SEQ ID NO: 5036 - protein, 168 aa, unidentified; identical to SEQ ID NO: 5016
  REGION 1..168: note = Description of Unknown: uncultivated organism with predicted taxonomy: Phascolarctobacterium succinatutens
  REGION 1..168: note = MG18-49 HNH domain

SEQ ID NO: 5037 - protein, 168 aa, unidentified; identical to SEQ ID NO: 4996
  REGION 1..168: note = Description of Unknown: uncultivated organism with predicted taxonomy: Phascolarctobacterium succinatutens
  REGION 1..168: note = MG18-50 HNH domain

SEQ ID NO: 5038 - protein, 168 aa, unidentified
  REGION 1..168: note = Description of Unknown: uncultivated organism with predicted taxonomy: Phascolarctobacterium succinatutens
  REGION 1..168: note = MG18-51 HNH domain
SKEESKRTDSRLKKLQDLYKKCREENIDFMPRKDEFNALKTQLSSKKEEDLRSDKLYLYYTQMGRCMYTGERIELASLDDNNLYDIDHIYPRSKTKDDSLSNRVLVKKEVNAAKTDIYPLDAVIRTKMHSFWKLLYDKGFIDERKYERLTRSTQLRDEELAGFISRQL

SEQ ID NO: 5039 - protein, 168 aa, unidentified; identical to SEQ ID NO: 5011
  REGION 1..168: note = Description of Unknown: uncultivated organism with predicted taxonomy: Phascolarctobacterium succinatutens
  REGION 1..168: note = MG18-52 HNH domain

SEQ ID NO: 5040 - protein, 168 aa, unidentified
  REGION 1..168: note = Description of Unknown: uncultivated organism with predicted taxonomy: Firmicutes
  REGION 1..168: note = MG18-53 HNH domain
SKEESKRTDSRLKKLQDLYKKCREENIDFMPRKDEFNALKTQLSSKKEEDLRSDKLYLYYTQMGRCMYTGERIELASLYDNNLYDIDHIYPRSKTKDDSLSNRVLVKKQVNAAKTDIYPLDAAIRTKMHSFWKLLYDKGFIDERKYERLTRNTQLGDEELAGFISRQL

SEQ ID NO: 5041 - protein, 168 aa, unidentified
  REGION 1..168: note = Description of Unknown: uncultivated organism with predicted taxonomy: Phascolarctobacterium
  REGION 1..168: note = MG18-54 HNH domain
SKEESKRTDSRLKKLQDLYKQCKEENIDFMPHTDELNAFKIQLSSKKEDDLRSDKLYLYYTQMGRCMYTGERIEIASLYDDNLYDIDHIYPRSKTKDDSLSNRVLVKKEVNAAKTDIYPLDAAIRTKMHTFWKLLYDKGFIDERKYERLIRSKQLRDEELAGFISRQL

SEQ ID NO: 5042 - protein, 168 aa, unidentified; identical to SEQ ID NO: 5026
  REGION 1..168: note = Description of Unknown: uncultivated organism with predicted taxonomy: Phascolarctobacterium
  REGION 1..168: note = MG18-55 HNH domain

SEQ ID NO: 5043 - protein, 168 aa, unidentified; identical to SEQ ID NO: 4996
  REGION 1..168: note = Description of Unknown: uncultivated organism with predicted taxonomy: Phascolarctobacterium succinatutens
  REGION 1..168: note = MG18-56 HNH domain

SEQ ID NO: 5044 - protein, 168 aa, unidentified
  REGION 1..168: note = Description of Unknown: uncultivated organism with predicted taxonomy: Phascolarctobacterium succinatutens
  REGION 1..168: note = MG18-57 HNH domain
SKEESKRTDSRLKKLHDLYKKCREENIDFMPRKDEFNALKTQLSSKKEENLRSDKLYLYYTQMGRCMYTGERIELASLHDNNLYDIDHIYPRSKTKDDSLSNRVLVKKQINAAKTDTYPLDAAIRTKMHSFWKLLYDKGFIDERKYERLTRSTQLRDEELAGFISRQL

SEQ ID NO: 5045 - protein, 168 aa, unidentified
  REGION 1..168: note = Description of Unknown: uncultivated organism with predicted taxonomy: Phascolarctobacterium succinatutens
  REGION 1..168: note = MG18-58 HNH domain
SKEESKRTDSRLKKLQDLYKKCREENIDFMPRKDEFNALKTQLSSKKEEDLRSDKLYLYYTQMGRCMYTGERIELASLHDNNLYDIDHIYPRSKTKDDSLSNRVLVKKQVNAAKTDIYPLDAAIRTKMHSFWKLLYDKGFIDERKYERLTRSTQLRDEELAGFISRQL

SEQ ID NO: 5046 - protein, 168 aa, unidentified; identical to SEQ ID NO: 5040
  REGION 1..168: note = Description of Unknown: uncultivated organism with predicted taxonomy: Phascolarctobacterium succinatutens
  REGION 1..168: note = MG18-59 HNH domain

SEQ ID NO: 5047 - protein, 168 aa, unidentified; identical to SEQ ID NO: 5016
  REGION 1..168: note = Description of Unknown: uncultivated organism
  REGION 1..168: note = MG18-60 HNH domain

SEQ ID NO: 5048 - protein, 168 aa, unidentified; identical to SEQ ID NO: 5011
  REGION 1..168: note = Description of Unknown: uncultivated organism with predicted taxonomy: Phascolarctobacterium succinatutens
  REGION 1..168: note = MG18-61 HNH domain

SEQ ID NO: 5049 - protein, 168 aa, unidentified
  REGION 1..168: note = Description of Unknown: uncultivated organism with predicted taxonomy: Phascolarctobacterium succinatutens
  REGION 1..168: note = MG18-62 HNH domain
SKEESKRTDSRLKKLQDLYKKCREENIDFMPRKDEFNALKTQLSSKKEENLRSDKLYLYYTQMGRCMYTGERIELASLYDNNLYDIDHIYPRSKTKDDSLSNRVLVKKQVNAAKTDTYPLDAAIRIKMHSFWKLLYDKGFIDERKYERLTRSTQLRDEELAGFISRQL

SEQ ID NO: 5050 - protein, 168 aa, unidentified; identical to SEQ ID NO: 5011
  REGION 1..168: note = Description of Unknown: uncultivated organism
  REGION 1..168: note = MG18-63 HNH domain

SEQ ID NO: 5051 - protein, 168 aa, unidentified
  REGION 1..168: note = Description of Unknown: uncultivated organism with predicted taxonomy: Phascolarctobacterium succinatutens
  REGION 1..168: note = MG18-64 HNH domain
SKEESKRTDSRLKKLQYLYKKCREENIDFMPRKDEFNALKTQLSSKKEEDLRSDKLYLYYTQMGRCMYTGESIELASLYDNNLYDIDHIYPRSKTKDDSLSNRVLVQKQVNAAKTDIYPLDAAIRTKMHSFWNLLYDKGFIDERKYERLMRSTQLRDEELAGFISRQL

SEQ ID NO: 5052 - protein, 168 aa, unidentified; identical to SEQ ID NO: 5016
  REGION 1..168: note = Description of Unknown: uncultivated organism with predicted taxonomy: Firmicutes
  REGION 1..168: note = MG18-65 HNH domain

SEQ ID NO: 5053 - protein, 168 aa, unidentified; identical to SEQ ID NO: 5011
  REGION 1..168: note = Description of Unknown: uncultivated organism with predicted taxonomy: Phascolarctobacterium succinatutens
  REGION 1..168: note = MG18-66 HNH domain

SEQ ID NO: 5054 - protein, 168 aa, unidentified; identical to SEQ ID NO: 4998
  REGION 1..168: note = Description of Unknown: uncultivated organism
  REGION 1..168: note = MG18-67 HNH domain

SEQ ID NO: 5055 - protein, 168 aa, unidentified; identical to SEQ ID NO: 5016
  REGION 1..168: note = Description of Unknown: uncultivated organism with predicted taxonomy: Phascolarctobacterium succinatutens
  REGION 1..168: note = MG18-68 HNH domain

SEQ ID NO: 5056 - protein, 168 aa, unidentified
  REGION 1..168: note = Description of Unknown: uncultivated organism with predicted taxonomy: Phascolarctobacterium succinatutens
  REGION 1..168: note = MG18-69 HNH domain
SKEESKRTDSRLKKLQDLYKKCREENIDFMPRKDEFNTLKTQLSSKKEDDLRSDKLYLYYTQMGRCMYTGEKIELASLYDNNLYDIDHIYPRSKTKDDSLSNRVLVKKQVNAAKTDIYPLDAAIRTKMHSFWKLLYDKGFIDERKYQRLTRSTQLRDEELAGFISRQL

SEQ ID NO: 5057 - protein, 168 aa, unidentified; identical to SEQ ID NO: 4995
  REGION 1..168: note = Description of Unknown: uncultivated organism with predicted taxonomy: Negativicutes
  REGION 1..168: note = MG18-70 HNH domain

SEQ ID NO: 5058 - protein, 168 aa, unidentified; identical to SEQ ID NO: 5016
  REGION 1..168: note = Description of Unknown: uncultivated organism with predicted taxonomy: Phascolarctobacterium succinatutens
  REGION 1..168: note = MG18-71 HNH domain

SEQ ID NO: 5059 - protein, 168 aa, unidentified
  REGION 1..168: note = Description of Unknown: uncultivated organism with predicted taxonomy: Phascolarctobacterium succinatutens
  REGION 1..168: note = MG18-72 HNH domain
SKEESKRTDSRLKKLQDLYKKCKEENIDFMPRKDEFNALKTQLSSKKEDDLRSDKLYLYYTQMGRCMYTGERIELASLYDNNLYDIDHIYPRSKTKDDSLSNRVLVKKQVNAAKTDTYPLDAAIRIKMHSFWKLLYDKGFIDERKYERLTRSTQLRDEELAGFISRQL

SEQ ID NO: 5060 - protein, 168 aa, unidentified; identical to SEQ ID NO: 5038
  REGION 1..168: note = Description of Unknown: uncultivated organism with predicted taxonomy: Phascolarctobacterium
  REGION 1..168: note = MG18-73 HNH domain

SEQ ID NO: 5061 - protein, 168 aa, unidentified; identical to SEQ ID NO: 5026
  REGION 1..168: note = Description of Unknown: uncultivated organism with predicted taxonomy: Phascolarctobacterium succinatutens
  REGION 1..168: note = MG18-74 HNH domain

SEQ ID NO: 5062 - protein, 168 aa, unidentified; identical to SEQ ID NO: 4990
  REGION 1..168: note = Description of Unknown: uncultivated organism with predicted taxonomy: Phascolarctobacterium
  REGION 1..168: note = MG18-75 HNH domain

SEQ ID NO: 5063 - protein, 168 aa, unidentified; identical to SEQ ID NO: 4992
  REGION 1..168: note = Description of Unknown: uncultivated organism with predicted taxonomy: Phascolarctobacterium succinatutens
  REGION 1..168: note = MG18-76 HNH domain

SEQ ID NO: 5064 - protein, 20 aa, unidentified
  REGION 1..20: note = Description of Unknown: uncultivated organism with predicted taxonomy: Clostridiales
  REGION 1..20: note = MG18-77 HNH domain
SKEESKRTDSRLKKLQGRKY

SEQ ID NO: 5065 - protein, 168 aa, unidentified; identical to SEQ ID NO: 5011
  REGION 1..168: note = Description of Unknown: uncultivated organism with predicted taxonomy: Phascolarctobacterium
  REGION 1..168: note = MG18-78 HNH domain

SEQ ID NO: 5066 - protein, 168 aa, unidentified
  REGION 1..168: note = Description of Unknown: uncultivated organism with predicted taxonomy: Phascolarctobacterium succinatutens
  REGION 1..168: note = MG18-79 HNH domain
SKEESKRTDSRLKKLQDLYKKRREENIDFMPRKDEFNALKTQLSSKKEENLRSDKLYLYYTQMGRCMYTGERIELASLHDNNLYDIDHIYPRSKTKDDSLSNRVLVKKQVNAAKTDTYPLDAAIRTKMHSFWKLLYDKGFIDERKYERLTRSTQLRDEELAGFISRQL

SEQ ID NO: 5067 - protein, 168 aa, unidentified; identical to SEQ ID NO: 5010
  REGION 1..168: note = Description of Unknown: uncultivated organism with predicted taxonomy: Phascolarctobacterium succinatutens
  REGION 1..168: note = MG18-80 HNH domain

SEQ ID NO: 5068 - protein, 168 aa, unidentified; identical to SEQ ID NO: 4994
  REGION 1..168: note = Description of Unknown: uncultivated organism with predicted taxonomy: Phascolarctobacterium succinatutens
  REGION 1..168: note = MG18-81 HNH domain

SEQ ID NO: 5069 - protein, 168 aa, unidentified; identical to SEQ ID NO: 4999
  REGION 1..168: note = Description of Unknown: uncultivated organism with predicted taxonomy: Phascolarctobacterium succinatutens
  REGION 1..168: note = MG18-82 HNH domain

SEQ ID NO: 5070 - protein, 168 aa, unidentified; identical to SEQ ID NO: 5015
  REGION 1..168: note = Description of Unknown: uncultivated organism with predicted taxonomy: Phascolarctobacterium succinatutens
  REGION 1..168: note = MG18-83 HNH domain

SEQ ID NO: 5071 - protein, 168 aa, unidentified
  REGION 1..168: note = Description of Unknown: uncultivated organism with predicted taxonomy: Phascolarctobacterium succinatutens
  REGION 1..168: note = MG18-84 HNH domain
SKEESKRTDSRLKKLQDLYKKCKEENIDFMPRKDEFNALKTQLSSKKEDDLRIDKLYLYYTQMGRCMYTGERIELASLYDNNLYDIDHIYPRSKTKDDSLSNRVLVKKQVNAAKTDTYPLDAAIRIKMHSFWKLLYDKGFIDERKYERLTRSTQLRDEELAGFISRQL

SEQ ID NO: 5072 - protein, 168 aa, unidentified; identical to SEQ ID NO: 5010
  REGION 1..168: note = Description of Unknown: uncultivated organism with predicted taxonomy: Phascolarctobacterium
  REGION 1..168: note = MG18-85 HNH domain

SEQ ID NO: 5073 - protein, 168 aa, unidentified; identical to SEQ ID NO: 4996
  REGION 1..168: note = Description of Unknown: uncultivated organism with predicted taxonomy: Phascolarctobacterium succinatutens
  REGION 1..168: note = MG18-86 HNH domain

SEQ ID NO: 5074 - protein, 168 aa, unidentified
  REGION 1..168: note = Description of Unknown: uncultivated organism with predicted taxonomy: Phascolarctobacterium succinatutens
  REGION 1..168: note = MG18-87 HNH domain
SKEESKRTDSRLKKLQDLYKKCREENIDFMPRKDEFNTLKTQLSSKKEDDLRSDKLYLYYTQMGRCMYTGEKIELASLYDNNLYDIDHIYPRSKTKDDSLSNRVLVKKQVNAAKTDTYPLDAAIRTKMHSFWKLLYDKGFIDERKYERLTRSTQLRDEELAGFISRQL

SEQ ID NO: 5075 - protein, 168 aa, unidentified; identical to SEQ ID NO: 4990
  REGION 1..168: note = Description of Unknown: uncultivated organism with predicted taxonomy: Phascolarctobacterium
  REGION 1..168: note = MG18-88 HNH domain

SEQ ID NO: 5076 - protein, 168 aa, unidentified
  REGION 1..168: note = Description of Unknown: uncultivated organism with predicted taxonomy: Firmicutes
  REGION 1..168: note = MG18-89 HNH domain
SKEESKRTDSRLKKLQDLYKKCREENIDFMPRKDEFNVLKTQLSSKKEEDLRSDKLYLYYTQMGRCMYTGERIELASLYDNNLYDIDHIYPRSKTKDDSLSNRVLVKKQINAAKTDTYPLDAAIRTKMHSFWKLLYDKGFIDERKYERLTRSTQLRDEELAGFISRQL

SEQ ID NO: 5077 - protein, 168 aa, unidentified; identical to SEQ ID NO: 5026
  REGION 1..168: note = Description of Unknown: uncultivated organism with predicted taxonomy: Phascolarctobacterium
  REGION 1..168: note = MG18-90 HNH domain

SEQ ID NO: 5078 - protein, 168 aa, unidentified; identical to SEQ ID NO: 5015
  REGION 1..168: note = Description of Unknown: uncultivated organism with predicted taxonomy: Phascolarctobacterium succinatutens
  REGION 1..168: note = MG18-91 HNH domain

SEQ ID NO: 5079 - protein, 168 aa, unidentified; identical to SEQ ID NO: 5056
  REGION 1..168: note = Description of Unknown: uncultivated organism with predicted taxonomy: Phascolarctobacterium succinatutens
  REGION 1..168: note = MG18-92 HNH domain

SEQ ID NO: 5080 - protein, 168 aa, unidentified; identical to SEQ ID NO: 4999
  REGION 1..168: note = Description of Unknown: uncultivated organism
  REGION 1..168: note = MG18-93 HNH domain

SEQ ID NO: 5081 - protein, 168 aa, unidentified; identical to SEQ ID NO: 5016
  REGION 1..168: note = Description of Unknown: uncultivated organism with predicted taxonomy: Phascolarctobacterium succinatutens
  REGION 1..168: note = MG18-94 HNH domain

SEQ ID NO: 5082 - protein, 168 aa, unidentified; identical to SEQ ID NO: 5016
  REGION 1..168: note = Description of Unknown: uncultivated organism
  REGION 1..168: note = MG18-95 HNH domain

SEQ ID NO: 5083 - protein, 168 aa, unidentified; identical to SEQ ID NO: 5056
  REGION 1..168: note = Description of Unknown: uncultivated organism with predicted taxonomy: Clostridium sp. CAG:964
  REGION 1..168: note = MG18-96 HNH domain

SEQ ID NO: 5084 - protein, 168 aa, unidentified; identical to SEQ ID NO: 5011
  REGION 1..168: note = Description of Unknown: uncultivated organism with predicted taxonomy: Phascolarctobacterium succinatutens
  REGION 1..168: note = MG18-97 HNH domain

SEQ ID NO: 5085 - protein, 168 aa, unidentified; identical to SEQ ID NO: 5015
  REGION 1..168: note = Description of Unknown: uncultivated organism with predicted taxonomy: Phascolarctobacterium succinatutens
  REGION 1..168: note = MG18-98 HNH domain

SEQ ID NO: 5086 - protein, 168 aa, unidentified; identical to SEQ ID NO: 4992
  REGION 1..168: note = Description of Unknown: uncultivated organism with predicted taxonomy: Firmicutes
  REGION 1..168: note = MG18-99 HNH domain

SEQ ID NO: 5087 - protein, 168 aa, unidentified; identical to SEQ ID NO: 4998
  REGION 1..168: note = Description of Unknown: uncultivated organism with predicted taxonomy: Phascolarctobacterium succinatutens
  REGION 1..168: note = MG18-100 HNH domain

SEQ ID NO: 5088 - protein, 168 aa, unidentified
  REGION 1..168: note = Description of Unknown: uncultivated organism with predicted taxonomy: Firmicutes
  REGION 1..168: note = MG18-101 HNH domain
SKEESKRTDSRLKKLQDLYKKCKEENIDFMPRKDEFNALKTQLSSKKEDDLRSDKLYLYYTQMGCCMYTGERIELASLYNDNLYDIDHIYPRSKTKDDSLSNRVLVKKEVNAAKTDIYPLDAAIRTKMHSFWKLLYDKGFIDERKYERLTRSTQLRDEELAGFISRQL

SEQ ID NO: 5089 - protein, 168 aa, unidentified
  REGION 1..168: note = Description of Unknown: uncultivated organism with predicted taxonomy: Firmicutes
  REGION 1..168: note = MG18-102 HNH domain
SKEESKRTDSRLKKLQDLYKKCREENIDFMPRKDEFNALKTQLSSKKEDDLRSDKLYLYYTQMGRCMYTGESIELASLYDNNLYDIDHIYPRSKTKDDSLSNRVLVKKQVNAAKTDIYPLDAAIRTKMHSFWKLLYDKGFIDERKYERLMRSTQLRDEELAGFISRQL

SEQ ID NO: 5090 - protein, 168 aa, unidentified
  REGION 1..168: note = Description of Unknown: uncultivated organism with predicted taxonomy: Phascolarctobacterium succinatutens
  REGION 1..168: note = MG18-103 HNH domain
SKEESKRTDSRLKKLQDLYKKCREENIDFMPRKDEFNALKTQLSSKKEEDLRSDKLYLYYTQMGRCMYTGERIELASLHDNNLYDIDHIYPRSKTKDDSLSNRVLVKKEVNAAKTDIYPLDAVIRTKMHSFWKLLYDKGFIDERKYERLTRSTQLRDEELAGFISRQL

SEQ ID NO: 5091 - protein, 168 aa, unidentified; identical to SEQ ID NO: 4998
  REGION 1..168: note = Description of Unknown: uncultivated organism with predicted taxonomy: Phascolarctobacterium
  REGION 1..168: note = MG18-104 HNH domain

SEQ ID NO: 5092 - protein, 168 aa, unidentified; identical to SEQ ID NO: 4998
  REGION 1..168: note = Description of Unknown: uncultivated organism with predicted taxonomy: Phascolarctobacterium succinatutens
  REGION 1..168: note = MG18-105 HNH domain

SEQ ID NO: 5093 - protein, 168 aa, unidentified; identical to SEQ ID NO: 4996
  REGION 1..168: note = Description of Unknown: uncultivated organism with predicted taxonomy: Firmicutes
  REGION 1..168: note = MG18-106 HNH domain

SEQ ID NO: 5094 - protein, 168 aa, unidentified
  REGION 1..168: note = Description of Unknown: uncultivated organism with predicted taxonomy: Phascolarctobacterium succinatutens
  REGION 1..168: note = MG18-107 HNH domain
SKEESKRTDSRLKKLQDLYKKCREENIDFMPRKDEFNAFKTQLSSKKEEDLRSDKLYLYYTQMGRCMYTGERIELASLHDNNLYDIDHIYPRSKTKDDSLSNRVLVKKQVNAAKTDTYPLDAAIRTKMHSFWKLLYDKGFIDERKYERLTRSTQLRDEELAGFISRQL

SEQ ID NO: 5095 - protein, 168 aa, unidentified; identical to SEQ ID NO: 4991
  REGION 1..168: note = Description of Unknown: uncultivated organism with predicted taxonomy: Ruminococcaceae bacterium
  REGION 1..168: note = MG18-108 HNH domain

SEQ ID NO: 5096 - protein, 168 aa, unidentified
  REGION 1..168: note = Description of Unknown: uncultivated organism with predicted taxonomy: Phascolarctobacterium succinatutens
  REGION 1..168: note = MG18-109 HNH domain
SKEESKRTDSRLKKLQDLYKKCREENIDFMPRKDEFNALKTQLSSKKEENLRSDKLYLYYTQMGRCMYTGERIELASLYDNNLYDIDHIYPRSKTKDDSLSNRVLVKKQINAAKTDTYPLDAAIRTKMHSFWKLLYDKGFIDERKYERLTRSTQLRDEELVGFISRQL

SEQ ID NO: 5097 - protein, 75 aa, unidentified
  REGION 1..75: note = Description of Unknown: uncultivated organism with predicted taxonomy: Clostridiales bacterium
  REGION 1..75: note = MG18-110 HNH domain
SKEESKRTDSRLKKLQDLYKKCREENIDFMPRKDEFNALKTQLSSKKEENLRSDKLYLYYTQMGRCMYTGERLSL

SEQ ID NO: 5098 - protein, 168 aa, unidentified; identical to SEQ ID NO: 4992
  REGION 1..168: note = Description of Unknown: uncultivated organism with predicted taxonomy: Phascolarctobacterium succinatutens
  REGION 1..168: note = MG18-111 HNH domain

SEQ ID NO: 5099 - protein, 168 aa, unidentified; identical to SEQ ID NO: 5074
  REGION 1..168: note = Description of Unknown: uncultivated organism with predicted taxonomy: Phascolarctobacterium succinatutens
  REGION 1..168: note = MG18-112 HNH domain

SEQ ID NO: 5100 - protein, 168 aa, unidentified
  REGION 1..168: note = Description of Unknown: uncultivated organism with predicted taxonomy: Clostridiales
  REGION 1..168: note = MG18-113 HNH domain
SKEESKRTDSRLKKLQDLYKKCREENIDFIPLKDEFNALKTQLSSKKEEDLRSDKLYLYYTQMGCCMYTGERIELASLYDNNLYDIDHIYPRSKTKDDSLSNRVLVKKQVNAAKTDIYPLDAAIRTKMHSFWKLLYDKGFIDERKYERLTRSTQLRDEELAGFISRQL

SEQ ID NO: 5101 - protein, 168 aa, unidentified
  REGION 1..168: note = Description of Unknown: uncultivated organism with predicted taxonomy: Phascolarctobacterium
  REGION 1..168: note = MG18-114 HNH domain
SKEESKRTDSRLKKLQDLYKKCREENIDFMPRKDEFNVLKTQLSSKNEEDLRSDKLYLYYTQMGRCMYTGEIIELASLNDNNLYDIDHIYPRSKTKDDSLSNRVLVKKQVNAAKTDIYPLDAAIRTKMHSFWKLLYDKGFIDERKYERLTRSTQLRDEELAGFISRQL

SEQ ID NO: 5102 - protein, 168 aa, unidentified; identical to SEQ ID NO: 5038
  REGION 1..168: note = Description of Unknown: uncultivated organism with predicted taxonomy: Phascolarctobacterium succinatutens
  REGION 1..168: note = MG18-115 HNH domain

SEQ ID NO: 5103 - protein, 168 aa, unidentified; identical to SEQ ID NO: 5015
  REGION 1..168: note = Description of Unknown: uncultivated organism with predicted taxonomy: Phascolarctobacterium succinatutens
  REGION 1..168: note = MG18-116 HNH domain

SEQ ID NO: 5104 - protein, 168 aa, unidentified; identical to SEQ ID NO: 5011
  REGION 1..168: note = Description of Unknown: uncultivated organism with predicted taxonomy: Phascolarctobacterium
  REGION 1..168: note = MG18-117 HNH domain

SEQ ID NO: 5105 - protein, 168 aa, unidentified
  REGION 1..168: note = Description of Unknown: uncultivated organism with predicted taxonomy: Phascolarctobacterium succinatutens
  REGION 1..168: note = MG18-118 HNH domain
SKEESKRTDSRLKKLQDLYKKCREENIDFMPRKDEFNTLKTQLSSKKEDDLRSDKLYLYYTQMGRCMYTGEKIELASLYDNNLYDIDHIYPRSKTKDDSLSNRVLVKKQVNAAKTDIYPLDAAIRTKMHSFWKILYDKGFIDERKYQRLTRSTQLRDEELAGFISRQL

SEQ ID NO: 5106 - protein, 168 aa, unidentified; identical to SEQ ID NO: 5016
  REGION 1..168: note = Description of Unknown: uncultivated organism with predicted taxonomy: Phascolarctobacterium succinatutens
  REGION 1..168: note = MG18-119 HNH domain

SEQ ID NO: 5107 - protein, 168 aa, unidentified; identical to SEQ ID NO: 5056
  REGION 1..168: note = Description of Unknown: uncultivated organism with predicted taxonomy: Phascolarctobacterium succinatutens
  REGION 1..168: note = MG18-120 HNH domain

SEQ ID NO: 5108 - protein, 168 aa, unidentified; identical to SEQ ID NO: 5038
  REGION 1..168: note = Description of Unknown: uncultivated organism with predicted taxonomy: Phascolarctobacterium succinatutens
  REGION 1..168: note = MG18-121 HNH domain

SEQ ID NO: 5109 - protein, 168 aa, unidentified
  REGION 1..168: note = Description of Unknown: uncultivated organism with predicted taxonomy: Phascolarctobacterium
  REGION 1..168: note = MG18-122 HNH domain
SKEESKRTDSRLKKLQDLYKKCREENIDFMHRKDEFNALKTQLSSKKEEDLRSDKLYLYYTQMGRCMYTGERIELASLYDNNLYDIDHIYPRSKTKDDSLSNRVLVKKQVNAAKTDIYPLDAAISTKMHSFWKLLYDKGFIDERKYERLTRSTQLRDEELAGFISRQL

SEQ ID NO: 5110 - protein, 168 aa, unidentified; identical to SEQ ID NO: 5011
  REGION 1..168: note = Description of Unknown: uncultivated organism with predicted taxonomy: Phascolarctobacterium succinatutens
  REGION 1..168: note = MG18-123 HNH domain

SEQ ID NO: 5111 - protein, 168 aa, unidentified
  REGION 1..168: note = Description of Unknown: uncultivated organism with predicted taxonomy: Phascolarctobacterium succinatutens
  REGION 1..168: note = MG18-124 HNH domain
SKEESKRTDSRLKKLQDLYKKCREENIDFMPRKDEFNALKTMLSSQKEEDLRSDKLYLYYTQMGRCMYTGERIELASLYDNNLYDIDHIYPRSKTKDDSLSNRVLVKKQVNAAKTDTYPLDAAIRTKMHSFWKLLYDKGFIDERKYERLTRSTQLRDEELAGFISRQL

SEQ ID NO: 5112 - protein, 168 aa, unidentified; identical to SEQ ID NO: 5026
  REGION 1..168: note = Description of Unknown: uncultivated organism with predicted taxonomy: Phascolarctobacterium
  REGION 1..168: note = MG18-125 HNH domain

SEQ ID NO: 5113 - protein, 168 aa, unidentified; identical to SEQ ID NO: 5100
  REGION 1..168: note = Description of Unknown: uncultivated organism with predicted taxonomy: Phascolarctobacterium
  REGION 1..168: note = MG18-126 HNH domain

SEQ ID NO: 5114 - protein, 168 aa, unidentified; identical to SEQ ID NO: 5071
  REGION 1..168: note = Description of Unknown: uncultivated organism with predicted taxonomy: Phascolarctobacterium
  REGION 1..168: note = MG18-127 HNH domain

SEQ ID NO: 5115 - protein, 168 aa, unidentified
  REGION 1..168: note = Description of Unknown: uncultivated organism with predicted taxonomy: Phascolarctobacterium
  REGION 1..168: note = MG18-128 HNH domain
SKEESKRTDSRLKKLQDLYKQCREENIDFMPHTDELNAFKIQLSSKKEDDLRSDKLYLYYTQMGRCMYTGEIIELASLYDNNLYDIDHIYPRSKTKDDSLSNRVLVKKQVNAAKTDIYPLDAAIRTKMHSFWKLLYDKGFIDERKYERLTRSTQLRDEELAGFISRQL

SEQ ID NO: 5116 - protein, 168 aa, unidentified
  REGION 1..168: note = Description of Unknown: uncultivated organism with predicted taxonomy: Phascolarctobacterium succinatutens
  REGION 1..168: note = MG18-129 HNH domain
SKEESKRTDSRLKKLQDLYKKCREENIDFMPRKDEFNVLKTQLSSKNEEDLRSDKLYLYYTQMGRCMYTGEIIELASLYDNNLYDIDHIYPRSKTKDDSLSNRVLVKKQVNAAKTDIYPLDAAIRTKMHSFWKLLYDKGFIDERKYERLTRSTQLRDEELAGFISRQL

SEQ ID NO: 5117 - protein, 168 aa, unidentified
  REGION 1..168: note = Description of Unknown: uncultivated organism with predicted taxonomy: Phascolarctobacterium succinatutens
  REGION 1..168: note = MG18-130 HNH domain
SKEESKRTDSRLKKLQDLYKKCREENIDFMPRKDEFNTLKTQLNSKKEDDLRRDKLYLYYTQMGRCMYTGEKIELASLYDNNLYDIDHIYPRSKTKDDSLSNRVLVKKQVNAAKTDTYPLDAAIRTKMHSFWKLLYDKGFIDERKYQRLTRSTQLRDEELAGFISRQL

SEQ ID NO: 5118 - protein, 168 aa, unidentified; identical to SEQ ID NO: 5015
  REGION 1..168: note = Description of Unknown: uncultivated organism with predicted taxonomy: Phascolarctobacterium succinatutens
  REGION 1..168: note = MG18-131 HNH domain

SEQ ID NO: 5119 - protein, 168 aa, unidentified; identical to SEQ ID NO: 5056
  REGION 1..168: note = Description of Unknown: uncultivated organism with predicted taxonomy: Phascolarctobacterium succinatutens
  REGION 1..168: note = MG18-132 HNH domain

SEQ ID NO: 5120 - protein, 168 aa, unidentified; identical to SEQ ID NO: 5109
  REGION 1..168: note = Description of Unknown: uncultivated organism with predicted taxonomy: Phascolarctobacterium succinatutens
  REGION 1..168: note = MG18-133 HNH domain

SEQ ID NO: 5121 - protein, 162 aa, unidentified
  REGION 1..162: note = Description of Unknown: uncultivated organism with predicted taxonomy: Clostridiales
  REGION 1..162: note = MG18-135 HNH domain
GASPEQKNKRTVSRKDQLLALYKACKEDARDWCSELEALPEDKLRSDKLYLYYTQMGRCMYSGELIRLDDLMHDTANQLYDIDHIYPQSKTKDDSLTNRVLVKRQLNAIKSNDYPLPQAMRQTALWKALLEKGLISKQKYLRLTRTTPFTGEELAGFINRQL

SEQ ID NO: 5122 - protein, 162 aa, unidentified
  REGION 1..162: note = Description of Unknown: uncultivated organism with predicted taxonomy: Clostridiales
  REGION 1..162: note = MG18-136 HNH domain
GASPEQKNKRTVSRKDQLLALYKACKEDARDWCGELEALPEDKLRSDKLYLYYTQMGRCMYSGEPIRLDDLMHDTANQLYDIDHIYPQSKTKDDSLTNRVLVKRQLNAIKSNDYPLPQAMRQTALWKALLEKGLISKQKYLRLTRTTPFTEEELAGFINRQL

SEQ ID NO: 5123 - protein, 162 aa, unidentified; identical to SEQ ID NO: 5122
  REGION 1..162: note = Description of Unknown: uncultivated organism with predicted taxonomy: Dorea sp. OM02-2LB
  REGION 1..162: note = MG18-137 HNH domain

SEQ ID NO: 5124 - protein, 168 aa, unidentified
  REGION 1..168: note = Description of Unknown: uncultivated organism with predicted taxonomy: Phascolarctobacterium
  REGION 1..168: note = MG18-138 HNH domain
SKEESKRTDSRLKKLQDLYKKCREENIDFMPRKDEFNALKTLLSSQKEEDLRSDKLYLYYTQMGRCMYTGERIELASLYDNNLYDIDHIYPRSKTKDDSLSNRVLVKKQVNAAKTDTYPLDAAIRTKMHSFWKLLYDKGFIDERKYERLTRSTQLRDEELAGFISRQL

SEQ ID NO: 5125 - protein, 168 aa, unidentified
  REGION 1..168: note = Description of Unknown: uncultivated organism with predicted taxonomy: Phascolarctobacterium succinatutens
  REGION 1..168: note = MG18-139 HNH domain
SKEESKRTDSRLKKLQELYKKCREENIDFMPRKDEFNALKTQLSSKKEENLRSDKLYLYYTQMGRCMYTGERIELASLYDNNLYDIDHIYPRSKTKDDSLSNRVLVKKQVNAAKTDTYPLDAAIRTKMHSFWKLLYDKGFIDERKYERLTRSTQLRDEELAGFISRQL

SEQ ID NO: 5126 - protein, 168 aa, unidentified; identical to SEQ ID NO: 5125
  REGION 1..168: note = Description of Unknown: uncultivated organism with predicted taxonomy: Phascolarctobacterium succinatutens
  REGION 1..168: note = MG18-140 HNH domain

SEQ ID NO: 5127 - protein, 168 aa, unidentified
  REGION 1..168: note = Description of Unknown: uncultivated organism with predicted taxonomy: Firmicutes
  REGION 1..168: note = MG18-141 HNH domain
SKEESKRTDSRLKKLQDLYKKCREENIDFMPRKDEFNALKTQLSSKKEEDLRSDKLYLYYTQMGRCMYTGERIELASLYNDNLYDIDHIYPRSKTKDDSLSNRVLVKKQVNAAKTDIYPLDAAIRTKMHSFWKLIYDKGFIDERKYERLTRSTQLRDEELAGFISRQL

SEQ ID NO: 5128 - protein, 168 aa, unidentified; identical to SEQ ID NO: 5056
  REGION 1..168: note = Description of Unknown: uncultivated organism with predicted taxonomy: Clostridium sp. CAG:964
  REGION 1..168: note = MG18-142 HNH domain

SEQ ID NO: 5129 - protein, 162 aa, unidentified; identical to SEQ ID NO: 5121
  REGION 1..162: note = Description of Unknown: uncultivated organism with predicted taxonomy: Clostridiales
  REGION 1..162: note = MG18-143 HNH domain

SEQ ID NO: 5130 - protein, 162 aa, unidentified; identical to SEQ ID NO: 5122
  REGION 1..162: note = Description of Unknown: uncultivated organism with predicted taxonomy: Firmicutes
  REGION 1..162: note = MG18-144 HNH domain

SEQ ID NO: 5131 - protein, 162 aa, unidentified; identical to SEQ ID NO: 5122
  REGION 1..162: note = Description of Unknown: uncultivated organism with predicted taxonomy: Dorea sp. OM02-2LB
  REGION 1..162: note = MG18-145 HNH domain

SEQ ID NO: 5132 - protein, 168 aa, unidentified; identical to SEQ ID NO: 5125
  REGION 1..168: note = Description of Unknown: uncultivated organism with predicted taxonomy: Phascolarctobacterium succinatutens
  REGION 1..168: note = MG18-146 HNH domain

SEQ ID NO: 5133 - protein, 168 aa, unidentified; identical to SEQ ID NO: 5125
  REGION 1..168: note = Description of Unknown: uncultivated organism with predicted taxonomy: Firmicutes
  REGION 1..168: note = MG18-147 HNH domain

SEQ ID NO: 5134 - protein, 168 aa, unidentified
  REGION 1..168: note = Description of Unknown: uncultivated organism with predicted taxonomy: Lactobacillus oryzae
  REGION 1..168: note = MG18-148 HNH domain
SKEESKRTDSRLKKLQDLYKKCREENIDFMPRKDEFNTLKTQLSSKKEDDLRIDKLYLYYTQMGRCMYTGEKIELASLYDNNLYDIDHIYPRSKTKDDSLSNRVLVKKQVNAAKTDIYPLDAAIRTKMHSFWKLLYDKGFIDERKYQRLTRSTQLRDEELAGFISRQL

SEQ ID NO: 5135 - protein, 168 aa, unidentified; identical to SEQ ID NO: 5017
  REGION 1..168: note = Description of Unknown: uncultivated organism with predicted taxonomy: Phascolarctobacterium
  REGION 1..168: note = MG18-149 HNH domain

SEQ ID NO: 5136 - protein, 168 aa, unidentified
  REGION 1..168: note = Description of Unknown: uncultivated organism with predicted taxonomy: Firmicutes
  REGION 1..168: note = MG18-150 HNH domain
SKEESKRTDSRLKKLQDLYKKCREENIDFMPRKDEFNALKTQLSSKKEEDLRSDKLYLYYTQMGRCMYTGERIELASLYDDNLYDIDHIYPRSKTKDDSLSNRVLVNKEVNAAKTDIYPLDAAIRTKMHSFWKLLYDKGFIDERKYERLTRSTQLRDEELAGFISRQL

SEQ ID NO: 5137 - protein, 168 aa, unidentified
  REGION 1..168: note = Description of Unknown: uncultivated organism with predicted taxonomy: Phascolarctobacterium
  REGION 1..168: note = MG18-151 HNH domain
SKEESKRTDSRLKKLQDLYKKCREENIDFMPHTDELNAFKIQLSSKKEDDLRSDKLYLYYTQMGRCMYTGERIELASLYNDNLYDIDHIYPRSKTKDDSLSNRVLVKKEVNAAKTDIYPLDAVIRTKMHSFWKLLYDKGFIDERKYERLTRSTQLRDEELAGFISRQL

SEQ ID NO: 5138 - protein, 168 aa, unidentified; identical to SEQ ID NO: 5017
  REGION 1..168: note = Description of Unknown: uncultivated organism with predicted taxonomy: Phascolarctobacterium succinatutens
  REGION 1..168: note = MG18-152 HNH domain

SEQ ID NO: 5139 - protein, 168 aa, unidentified; identical to SEQ ID NO: 5124
  REGION 1..168: note = Description of Unknown: uncultivated organism with predicted taxonomy: Firmicutes
  REGION 1..168: note = MG18-153 HNH domain

SEQ ID NO: 5140 - protein, 168 aa, unidentified; identical to SEQ ID NO: 5011
  REGION 1..168: note = Description of Unknown: uncultivated organism with predicted taxonomy: Phascolarctobacterium succinatutens
  REGION 1..168: note = MG18-154 HNH domain

SEQ ID NO: 5141 - protein, 168 aa, unidentified; identical to SEQ ID NO: 4996
  REGION 1..168: note = Description of Unknown: uncultivated organism with predicted taxonomy: Phascolarctobacterium succinatutens
  REGION 1..168: note = MG18-155 HNH domain

SEQ ID NO: 5142 - protein, 168 aa, unidentified; identical to SEQ ID NO: 5127
  REGION 1..168: note = Description of Unknown: uncultivated organism with predicted taxonomy: Clostridium sp. CAG:964
  REGION 1..168: note = MG18-156 HNH domain

SEQ ID NO: 5143 - protein, 168 aa, unidentified
  REGION 1..168: note = Description of Unknown: uncultivated organism with predicted taxonomy: Ruminococcaceae bacterium
  REGION 1..168: note = MG18-157 HNH domain
SKEESKRTDSRLKKLQDLYKKCREENIDFMPRKDEFNALKTQLSSKKEEDLRSDKLYLYYTQMGRCMYTGERIELASLYDNNLYDIDHIYPRSKTKDDSLSNRVLVKKEVNAAKTDIYPLDAVIRTKMHSFWKLLYDKGFIDERKYERLTRSTQLRDEELAGFISRQL

SEQ ID NO: 5144 - protein, 168 aa, unidentified; identical to SEQ ID NO: 4996
  REGION 1..168: note = Description of Unknown: uncultivated organism with predicted taxonomy: Clostridium sp. CAG:964
  REGION 1..168: note = MG18-158 HNH domain

SEQ ID NO: 5145 - protein, 168 aa, unidentified; identical to SEQ ID NO: 5026
  REGION 1..168: note = Description of Unknown: uncultivated organism with predicted taxonomy: Phascolarctobacterium succinatutens
  REGION 1..168: note = MG18-159 HNH domain

SEQ ID NO: 5146 - protein, 158 aa, unidentified
  REGION 1..158: note = Description of Unknown: uncultivated organism with predicted taxonomy: Clostridiales
  REGION 1..158: note = MG18-160 HNH domain
GPGEKKRTVSRKDALIELYKTLKSDERDWINEIAVQPEDRFRSDRLYFYYLQLGKCLYTGKPIDLDQIYNEMVYDVDHIYPQSKVKDDSLVNRVLVDSTKNKEKSDRYPIDKEIRDRMKPFWKMLLQQGFMEKEKYERLTRSTPFSDNELAEFIARQL

SEQ ID NO: 5147 - protein, 158 aa, unidentified
  REGION 1..158: note = Description of Unknown: uncultivated organism with predicted taxonomy: Firmicutes
  REGION 1..158: note = MG21-1 HNH domain
EMGKNFKDRGKIAKSQADHAAKNERIKAQISEYKSDHITGQDIVKFKLFKEQDGICLYSGKSLDIARLFEPGYVDVDHIIPYSISFDDSYNNKVLVLSSENRQKGNRIPYAYFGQNSDRWEKYETLVSNTVRSYRKRKNLLLKSLSEAQIDGFKQRNL

SEQ ID NO: 5148 - protein, 160 aa, unidentified
  REGION 1..160: note = Description of Unknown: uncultivated organism with predicted taxonomy: Roseburia sp. AM23-20
  REGION 1..160: note = MG21-3 HNH domain
DMKRNFADRQDIKSKQKDNWSENNRRREKVEEIKGSVATGQDIVKMKLYEDQNGVCLYSGKQLELHRLFEVGYAEVDHIVPYSKCFDDSYNNKVLVFSSENQRKGNRLPLEYMLAEGDEDKLDDYVTLVEANIKNTRKKQRLLKPCLTEQDITDWKARNL

SEQ ID NO: 5149 - protein, 160 aa, unidentified; identical to SEQ ID NO: 5148
  REGION 1..160: note = Description of Unknown: uncultivated organism with predicted taxonomy: Clostridiales
  REGION 1..160: note = MG21-4 HNH domain

SEQ ID NO: 5150 - protein, 160 aa, unidentified; identical to SEQ ID NO: 5148
  REGION 1..160: note = Description of Unknown: uncultivated organism
  REGION 1..160: note = MG21-5 HNH domain

SEQ ID NO: 5151 - protein, 160 aa, unidentified; identical to SEQ ID NO: 5148
  REGION 1..160: note = Description of Unknown: uncultivated organism
  REGION 1..160: note = MG21-6 HNH domain

SEQ ID NO: 5152 - protein, 157 aa, unidentified
  REGION 1..157: note = Description of Unknown: uncultivated organism with predicted taxonomy: Clostridium sp. CAG:571
  REGION 1..157: note = MG21-7 HNH domain
ELGKNFADRRTIEKRQSDNMQTNEKAKESIIALGKNNPTGKDIVKFKLWQDQDCKCIYSGKTIPVEELFTDLVDVDHIIPYSQCFDDSYNNKVLVLASENRQKGNRVPYKYLKESGKNLEEYEIRVNTLIRNNKKKQNLLRQDFTREDAEDWKERNL

SEQ ID NO: 5153 - protein, 159 aa, unidentified
  REGION 1..159: note = Description of Unknown: uncultivated organism with predicted taxonomy: Clostridiales
  REGION 1..159: note = MG21-8 HNH domain
EMHHSIKERNRMKKRQEENREKNEQVKAQILETKPGTRVTGLDIVKFKLYQEQDGICPYSGKPLLIERLYEPGYAEVDHIIPYSRCFDDSYSNKVLVLAEENQQKGNRTPYEYFGANEQRWHEFSARVRASVRDFKKRQKLLNTSFGEEQGKDFIQRNL

SEQ ID NO: 5154 - protein, 160 aa, unidentified
  REGION 1..160: note = Description of Unknown: uncultivated organism
  REGION 1..160: note = MG21-9 HNH domain
DMKRNFTDRQDIKKKQDSNWSYNDKIREKVEELKGSAATGQDIVKMKLYEEQDGYCLYSGKQLDIRRLFEVGYAEVDHIVPYSKCFDDSYNNKVLVFSSENQRKGNRLPLEYMLAEGDEDKLDDYVTLVEARIKNTRKKQRLLKPCLTAEDSNDWKERNL

SEQ ID NO: 5155 - protein, 157 aa, unidentified
  REGION 1..157: note = Description of Unknown: uncultivated organism with predicted taxonomy: Clostridiales
  REGION 1..157: note = MG21-10 HNH domain
ELGKNFADRRTIEKRQSDNMQTNEKAKESIIALGKNNPTGKDIVKFKLWQDQDCKCIYSGKTIPVEELFTDLVDVDHIIPYSQCFDDSYNNKVLVLASENRQKGNRVPYKYLKESGKNVEEYEIRVNTLIRNNKKKQNLLRQDFTREDAEDWKERNL

SEQ ID NO: 5156 - protein, 157 aa, unidentified
  REGION 1..157: note = Description of Unknown: uncultivated organism with predicted taxonomy: Clostridiales
  REGION 1..157: note = MG21-11 HNH domain
ELGKNFADRRTIEKRQSDNMQTNEKAKESIIALGKNNPTGKDIVKFKLWQDQDCKCIYSGKTIPVEELFTDLVDVDHIIPYSQCFDDSYNNKVLVLASENRQKGNRVPYKYLKESGKNLEEYEIRVNTLIRNNKKKQNLLRQDFTREDSEDWKERNL

SEQ ID NO: 5157 - protein, 160 aa, unidentified
  REGION 1..160: note = Description of Unknown: uncultivated organism with predicted taxonomy: Helicobacter sp. MIT 11-5569
  REGION 1..160: note = MG21-12 HNH domain
DMKRNFADRQDIKKKQDNNWSCNDRIRQKVEEYKGSAATGQDIVKMKLYEEQNGVCLYSGKQLDIHRLFEVGYAEVDHIVPYSKCFDDSYNNKVLVFSSENQSKGNRLPLEYMLAEGDEDKLDNYVTLVEAFIKNTRKRQRLLKPCLTAEDSSDWKERNL

SEQ ID NO: 5158 - protein, 157 aa, unidentified
  REGION 1..157: note = Description of Unknown: uncultivated organism with predicted taxonomy: Clostridium
  REGION 1..157: note = MG21-13 HNH domain
EMGKNFNDRSKIKKSQEENMQRNENIRQAIIELGKSNPTGQDIVKYKLWQEQDNFCVYSGKKITVDMLFTEAVDVDHIIPYSMCFDDTYNNKVLVLASENRQKGNRVPYKYEKEIGRNIDEYVVRVGNIIKNPKKLRRLLREDFTKEDAKDWKNRNI

SEQ ID NO: 5159 - protein, 157 aa, unidentified
  REGION 1..157: note = Description of Unknown: uncultivated organism with predicted taxonomy: Clostridiales
  REGION 1..157: note = MG21-14 HNH domain
ELGKSFKERQSIEKIYEENRTRNEKAIQEIRELGKTNVTGKDIVKYKLWKDQNEICIYSGKHIKVEDLFTDAVDIDHIIPYSQCFDDTYKNKVLVLASENRQKGNRTAYKYIKEAGKNLEEYEVRVNNYIKDYRKKERLLKADFSTEDAKNWKDRNI

SEQ ID NO: 5160 - protein, 157 aa, unidentified
  REGION 1..157: note = Description of Unknown: uncultivated organism
  REGION 1..157: note = MG21-15 HNH domain
EMGRNFKDRNIIKKSQEINMKNNEFVKERIVELGKENPRGQDIVKYKLWQEQDGVCIYSGKKIPIENLFTEAVDVDHIIPYSMCFDDTYNNKVLVLASENRQKGNRVPYKYEKEIGRDIEEYEVRVNNIIKNPYKRVKLLREDFTREDALEWKDRNI

SEQ ID NO: 5161 - protein, 160 aa, unidentified
  REGION 1..160: note = Description of Unknown: uncultivated organism
  REGION 1..160: note = MG21-16 HNH domain
DMKRNFTDRQDIKKKQDNNWSYNDRIRQKVEELKGSAATGQDIVKMKLYEEQNGVCLYSGKQLDIHRLFEVGYAEVDHIVPYSKCFDDSYNNKVLVFSSENQSKGNRLPLEYMLAEGDEDKLDNYVTLVEAFIKNTRKRQRLLKPCLTAEDSSDWKERNL

SEQ ID NO: 5162 - protein, 158 aa, unidentified
  REGION 1..158: note = Description of Unknown: uncultivated organism with predicted taxonomy: Clostridiales
  REGION 1..158: note = MG21-17 HNH domain
EMSQNFDDRRKAEKRQEENRAANERVKEQIAEYKGDRATGLDIVKFKLYREQDGVCLYSGKNLDIGRLFEPGYADVDHIIPYSRCFDDSYQNKVLVLASENRQKGNRLPYEYFGQDETRWHEYEVRVENLIRNYRKRQKLLKKQLTEEESTGFIDRNL

SEQ ID NO: 5163 - protein, 158 aa, unidentified
  REGION 1..158: note = Description of Unknown: uncultivated organism with predicted taxonomy: Clostridiales bacterium 42_27
  REGION 1..158: note = MG21-18 HNH domain
EMSRNFDDRRKAEKRQEENRAANERAKEQIVEYKGDCATGLDIVKFKLYREQDGVCLYSGQNLDLSRLFEPGYVDVDHIIPYSRCFDDSYQNKTLVLASENRQKGNRLPYEYFGQDEARWHEYEVRVENLIRNYRKRQRLLKKRLTEDESAGFIDRNL

SEQ ID NO: 5164 - protein, 182 aa, unidentified
  REGION 1..182: note = Description of Unknown: uncultivated organism
  REGION 1..182: note = MG21-19 HNH domain
DIKCGSRTRERIAQENEANRERREKLINEVENIKKQKHCEKVNATEQEILKLQLYKDQHGKCLYSGKELDKDKVISESGYAEIDHIIPYSQSFDNSEANKVLTLSEENRNKGNDVPVAYILRKHKNSEKEYDAFVKRVKSVTKEVSNTNKDRQKILEKRKQNLLISPNFKVDELEGLLVRET

SEQ ID NO: 5165 - protein, 158 aa, unidentified; identical to SEQ ID NO: 5162
  REGION 1..158: note = Description of Unknown: uncultivated organism with predicted taxonomy: Clostridiales
  REGION 1..158: note = MG21-20 HNH domain

SEQ ID NO: 5166 - protein, 157 aa, unidentified
  REGION 1..157: note = Description of Unknown: uncultivated organism with predicted taxonomy: Clostridiales bacterium 42_27
  REGION 1..157: note = MG21-21 HNH domain
ELGKNFADRKAIEKRQNDNMQTNEKAKESIIALGKNNPTGKDIVKFKLWQDQDCKCIYSGKTIPVEELFTDLVDVDHIIPYSQCFDDSYNNKVLVLASENRQKGNRVPYKYLKESGKNLEEYEIRVNTLIRNNKKKQNLLRQDFTREDAEDWKERNL

SEQ ID NO: 5167 - protein, 158 aa, unidentified
  REGION 1..158: note = Description of Unknown: uncultivated organism with predicted taxonomy: Clostridiales
  REGION 1..158: note = MG21-22 HNH domain
EMSRTFDERRKMEKRQDDNRAANERAKDQIAEYKGDHATGLDIVKFKLYQEQDGVCLYSGQNLDIARLFEPGYADVDHIIPYSRCFDDSYQNKVLVLASENRQKGNRLPYEYFGQDEARWHGYEVRVENLIHNYRKRQKLLKRRLTEEESTGFIDRNL

SEQ ID NO: 5168 - protein, 159 aa, unidentified
  REGION 1..159: note = Description of Unknown: uncultivated organism with predicted taxonomy: Roseburia inulinivorans
  REGION 1..159: note = MG21-23 HNH domain
EMHHSIKERNRMKKRQEENREKNEQVKAQILETKPGTRVTGLDIVKFKLYQEQKGFCPYSGVEIKKERLYEPGYAEVDHIIPYSRCFDDSYSNKVLVLAEENRQKGNRTPYEYFGADEQRWHEFSARVRASVRDFKKRQKLLNTSFGEEQGKDFIQRNL

SEQ ID NO: 5169 - protein, 159 aa, unidentified
  REGION 1..159: note = Description of Unknown: uncultivated organism with predicted taxonomy: Firmicutes
  REGION 1..159: note = MG21-24 HNH domain
EMHHSIKERNRMKKRQEENREKNEQVKAQILETKPGTRVTGLDIVKFKLYQEQDGICLYSGKPMEIERLYEPGYAEVDHIIPYSRCFDDSYSNKVLVLAEENRQKGNRTPYEYFGADEQRWHEFSARVRASVRDFKKRQKLLNTSFGEEQKNEFTQRNL

SEQ ID NO: 5170 - protein, 158 aa, unidentified
  REGION 1..158: note = Description of Unknown: uncultivated organism with predicted taxonomy: Clostridiales bacterium 42_27
  REGION 1..158: note = MG21-25 HNH domain
EMSRTFDERRKMEKRQDDNRAANEQAKDQIAEYKGDHATGLDIVKFKLYREQDGVCLYSGQNLDIARLFEPGYADVDHIIPYSRCFDDSYQNKVLVLASENRQKGNRLPYEYFGQDEARWHGYEVRVENLIHNYRKRQKLLKRRLTEEESSGFIDRNL

SEQ ID NO: 5171 - protein, 158 aa, unidentified; identical to SEQ ID NO: 5170
  REGION 1..158: note = Description of Unknown: uncultivated organism with predicted taxonomy: Ruminococcaceae bacterium TF06-43
  REGION 1..158: note = MG21-26 HNH domain

SEQ ID NO: 5172 - protein, 158 aa, unidentified
  REGION 1..158: note = Description of Unknown: uncultivated organism with predicted taxonomy: Clostridiales
  REGION 1..158: note = MG21-27 HNH domain
EMGKPYDVRTQITKKQEANAKKNEELRQQIKKIKGAEPTGQDIVKFKLFQDQNGVCLYSGQNLDITRLFEAGYVDVDHIIPYSISFDDSYTNKVLVRSPENRQKGNRIPADYFKSDPARWQRFETLVNTRVHNWKKKRNLLTQALSEEQKNGFKQRNL

SEQ ID NO: 5173 - protein, 158 aa, unidentified
  REGION 1..158: note = Description of Unknown: uncultivated organism with predicted taxonomy: Clostridiales bacterium 42_27
  REGION 1..158: note = MG21-28 HNH domain
EMSRTFDERRKMEKRQDDNRAANERAKDQIAEYKGDHATGLDIVKFKLYREQDGVCLYSGQNLDIARLFEPGYADVDHIIPYSRCFDDSYQNKVLVLASENRQKGNRLPYEYFGQDEARWHGYEVRVENLIHNYRKRQKLLKRRLTEEESSGFIDRNL

SEQ ID NO: 5174 - protein, 158 aa, unidentified
  REGION 1..158: note = Description of Unknown: uncultivated organism with predicted taxonomy: Firmicutes
  REGION 1..158: note = MG21-29 HNH domain
EMSRNFDERRKAEKRQDENRAANERAKEQIAEYKGDHATGLDIVKFKLYQEQDGVCLYSGKNLDPSRLFEPGYADVDHIVPYSRCFDDSYQNKVLVLASENRQKGNRLPYEYFGNDDVRWHEYEVRVENLIRNYRKRQKLLKRQLSEEESAGFIDRNL

SEQ ID NO: 5175 - protein, 158 aa, unidentified; identical to SEQ ID NO: 5170
  REGION 1..158: note = Description of Unknown: uncultivated organism with predicted taxonomy: Clostridiales bacterium 42_27
  REGION 1..158: note = MG21-30 HNH domain

SEQ ID NO: 5176 - protein, 159 aa, unidentified
  REGION 1..159: note = Description of Unknown: uncultivated organism
  REGION 1..159: note = MG21-31 HNH domain
EMHHSIKERNRMKKRQEENREKNEQVKAQILETKPGTRVTGLDIVKFKLYQEQDGICLYSGKPLEIERLYEPGYAEVDHIIPYSRCFDDSYSNKVLVLAEENQQKGNCTPYEYFGADEQRWHEFSVRVGASVRDFKKRQKLLNTSFGEEQGKDFIQRNL

SEQ ID NO: 5177 - protein, 158 aa, unidentified
  REGION 1..158: note = Description of Unknown: uncultivated organism with predicted taxonomy: Ruminococcaceae bacterium TF06-43
  REGION 1..158: note = MG21-32 HNH domain
EMSRNFDERRKAEKRQDENRAANERAKEQIAEYKGDHATGLDIVKFKLYQEQDGVCLYSGKNLDPSRLFEPGYADVDHIVPYSRCFDDSYQNKVLVLASENRQKGNLLPYEYFGYDEVRWHEYEVRVENLIRNYRKRQKLLKRQLSEEESAGFIDRNL

SEQ ID NO: 5178 - protein, 158 aa, unidentified
  REGION 1..158: note = Description of Unknown: uncultivated organism with predicted taxonomy: Clostridiales
  REGION 1..158: note = MG21-33 HNH domain
EMGKPYDVRTQMTKKQEANAKRNEELRQQIKKIKGAEPTGQDIVKFKLFQDQNGVCLYSGQNLDITRLFEAGYVDVDHIIPYSISFDDSYTNKVLVRSPENRQKGNRIPADYFKSDPARWQRFETLVNTQVHNWKKKRNLLTQALSEEQKNGFKQRNL

SEQ ID NO: 5179 - protein, 158 aa, unidentified
  REGION 1..158: note = Description of Unknown: uncultivated organism with predicted taxonomy: Clostridiales
  REGION 1..158: note = MG21-34 HNH domain
EMSRNFDERRKAEKRQDENRAANERAKEQIAEYKGDHATGLDIVKFKLYQEQDGVCLYSGKNLDPSRLFEPGYADVDHIVPYSRCFDDSYQNKVLVLASENRQKGNRLPYEYFGYDEVRWHEYEVRVENLIRNYRKRQKLLKRQLSEEESAEFIDRNL

SEQ ID NO: 5180 - protein, 158 aa, unidentified
  REGION 1..158: note = Description of Unknown: uncultivated organism with predicted taxonomy: Clostridiales
  REGION 1..158: note = MG21-35 HNH domain
EMSRTFDERRKMEKRQDDNRAANERAKNQIAEYKGDHATGLDIVKFKLYREQDGVCLYSGQNLDIARLFEPGYADVDHIIPYSRCFDDSYQNKVLVLASENRQKGNRLPYEYFGQDEARWHGYEVRVENLIHNYRKRQKLLKRRLTEEESTGFIDRNL

SEQ ID NO: 5181 - protein, 157 aa, unidentified
  REGION 1..157: note = Description of Unknown: uncultivated organism
  REGION 1..157: note = MG21-36 HNH domain
ELSKNFADRQNIKKNQENNMQSNEKAKEDILKLGKSNPTGQDIVKYKLWKEQDGTCVYSGKHISIEDLFTEAVDVDHIIPYSMCFDDTYKNKVLVLSSENRQKGNKIPYQYMQEKGRDLDEYEIRVNNIIKNYSKKQRLLKQKFTREDANEWKDRNI

SEQ ID NO: 5182 - protein, 158 aa, unidentified
  REGION 1..158: note = Description of Unknown: uncultivated organism with predicted taxonomy: Clostridiales
  REGION 1..158: note = MG21-37 HNH domain
EMSRTFDERRKMEKRQDDNRAANEQAKDQIAEYKGDHATGLDIVKFKLYREQDGVCLYSGQNLDIARLFEPGYADVDHIIPYSRCFDDSYQNKVLVLASENRQKGNRLPYEYFGQDEARWHGYEVRVENLIHNYRKRQKLLKRRLTEEESTGFIDRNL

SEQ ID NO: 5183 - protein, 158 aa, unidentified; identical to SEQ ID NO: 5173
  REGION 1..158: note = Description of Unknown: uncultivated organism with predicted taxonomy: Clostridiales bacterium 42_27
  REGION 1..158: note = MG21-38 HNH domain

SEQ ID NO: 5184 - protein, 158 aa, unidentified
  REGION 1..158: note = Description of Unknown: uncultivated organism with predicted taxonomy: Clostridiales
  REGION 1..158: note = MG21-39 HNH domain
EMSRNFDERRKAEKRQDENRAANERAKEQIAEYKGDHATGLDIVKFKLYQEQDGVCLYSGKNLDPSRLFEPGYADVDHIVPYSRCFDDSYQNKVLVLASENRQKGNRLPYEYFGYDEVRWHEYEVRVENLIRNYRKRQKLLKRQLSEEESAGFIDRNL

SEQ ID NO: 5185 - protein, 158 aa, unidentified
  REGION 1..158: note = Description of Unknown: uncultivated organism with predicted taxonomy: Clostridiales
  REGION 1..158: note = MG21-40 HNH domain
EMSQNFEKRRKTEKRQDENRTANEKAKEQIAEYKGDRATGLDIVKFKLYREQDGVCLYSGRNLDLSRLFEPGYVDVDHIIPYSRCFDDSYQNKVLVLASENRQKGNRLPYEYFGQDEARWHGYEVRVENLIRNYRKRQKLLKKRLTEEESAGFIDRNL

SEQ ID NO: 5186 - protein, 159 aa, unidentified
  REGION 1..159: note = Description of Unknown: uncultivated organism with predicted taxonomy: Firmicutes
  REGION 1..159: note = MG21-41 HNH domain
EMSHSFDERNKMKKRQEDGWQKNEQVKAQILETKTGTRVTGLDIVKFKLYQEQDGICLYSGTPMEIERLYEPGYADVDHIIPYSRCFDDSYSNKVLVLASENRQKGNRTPYEYFGANEQRWHEFSVRVGASVRDFKKRQKLLNTSFGEEQGKEFIQRNL

SEQ ID NO: 5187 - protein, 157 aa, unidentified
  REGION 1..157: note = Description of Unknown: uncultivated organism with predicted taxonomy: Clostridiales
  REGION 1..157: note = MG21-42 HNH domain
ELGKNFADRRTIEKRQSDNTQTNEKAKESIIALGKNNPTGKDIVKFKLWQDQDCKCIYSGKTIPVEELFTDLVDVDHIIPYSQCFDDSYNNKVLVLASENRQKGNRVPYKYLKESGKNLEEYEIRVNTLIRNSKKKQNLLRQDFTREDAEDWKERNL

SEQ ID NO: 5188 - protein, 158 aa, unidentified
  REGION 1..158: note = Description of Unknown: uncultivated organism with predicted taxonomy: Clostridiales bacterium 42_27
  REGION 1..158: note = MG21-43 HNH domain
EMSRTFDERRKMEKRQDDNRAANKRAKDQIAEYKGDHATGLDIVKFKLYQEQDGVCLYSGQNLDIARLFEPGYADVDHIIPYSRCFDDSYQNKVLVLASENRQKGNRLPYEYFGQDEARWHGYEVRVENLIHNYRKRQKLLKRRLTEEESSGFIDRNL

SEQ ID NO: 5189 - protein, 157 aa, unidentified
  REGION 1..157: note = Description of Unknown: uncultivated organism with predicted taxonomy: Clostridiales
  REGION 1..157: note = MG21-44 HNH domain
QLSKKFADRQNIKKKQEQNMQNNDKAREEILKLGKNNPTGQDIVKYKLWQEQDGICVYSGKHISIEDLFTEAVDVDHIIPYSMCFDDTYKNKVLVLASENRQKGNRIPYQYLKEKGRNLEEYEVRVNNIIKNYYKKKRLLRQNFTREDATEWKDRNI

SEQ ID NO: 5190 - protein, 158 aa, unidentified; identical to SEQ ID NO: 5170
  REGION 1..158: note = Description of Unknown: uncultivated organism with predicted taxonomy: Clostridiales
  REGION 1..158: note = MG21-45 HNH domain

SEQ ID NO: 5191 - protein, 157 aa, unidentified; identical to SEQ ID NO: 5187
  REGION 1..157: note = Description of Unknown: uncultivated organism with predicted taxonomy: Clostridiales
  REGION 1..157: note = MG21-46 HNH domain

SEQ ID NO: 5192 - protein, 158 aa, unidentified; identical to SEQ ID NO: 5172
  REGION 1..158: note = Description of Unknown: uncultivated organism with predicted taxonomy: Clostridiales
  REGION 1..158: note = MG21-47 HNH domain

SEQ ID NO: 5193 - protein, 158 aa, unidentified; identical to SEQ ID NO: 5182
  REGION 1..158: note = Description of Unknown: uncultivated organism with predicted taxonomy: Clostridiales bacterium 42_27
  REGION 1..158: note = MG21-48 HNH domain

SEQ ID NO: 5194 - protein, 158 aa, unidentified
  REGION 1..158: note = Description of Unknown: uncultivated organism with predicted taxonomy: Clostridiales bacterium 42_27
  REGION 1..158: note = MG21-49 HNH domain
EMSRTFDERRKMEKRQDDNRAANERAKDQIAEYKGDHATGLDIVKFKLYQEQDGVCLYSGQNLDIARLFEPGYADVDHIIPYSRCFDDSYQNKVLVLASENRQKGNRLPYEYFGQDEARWHGYEVRVENLIHNYRKRQKLLKRRLTEEESSGFIDRNL

SEQ ID NO: 5195 - protein, 158 aa, unidentified; identical to SEQ ID NO: 5173
  REGION 1..158: note = Description of Unknown: uncultivated organism with predicted taxonomy: Clostridiales bacterium 42_27
  REGION 1..158: note = MG21-50 HNH domain

SEQ ID NO: 5196 - protein, 158 aa, unidentified; identical to SEQ ID NO: 5173
  REGION 1..158: note = Description of Unknown: uncultivated organism with predicted taxonomy: Clostridiales bacterium 42_27
  REGION 1..158: note = MG21-51 HNH domain

SEQ ID NO: 5197 - protein, 158 aa, unidentified
  REGION 1..158: note = Description of Unknown: uncultivated organism with predicted taxonomy: Clostridiales bacterium 42_27
  REGION 1..158: note = MG21-52 HNH domain
EMSRTFDERRKMEKRQDDNRAANERAKDQIAEYKGDHATGLDIVKFKLYREQDGVCLYSGQNLDIARLFEPGYADVDHIIPYSRCFDDSYQNKVLVLASENRQKGNRLPYEYFGQDEARWHGYEVRVENLIHNYRKRQKLLKRRLTEEESTGFIDRNL

SEQ ID NO: 5198 - protein, 158 aa, unidentified
  REGION 1..158: note = Description of Unknown: uncultivated organism with predicted taxonomy: Clostridiales
  REGION 1..158: note = MG21-53 HNH domain
EMGKPYDVRTQITKKQEANAKKNEELRQQIKKIKGAEPTGQDIVKFKLFQEQKGVCLYSGQNLDITRLFEAGYVDVDHIVPYSISFDDSYTNKVLVRSPENRQKGNRIPADYFKSDPARWQRFETLVNTRVHNWKKKRNLLTQALSEEQKNGFKQRNL

SEQ ID NO: 5199 - protein, 158 aa, unidentified
  REGION 1..158: note = Description of Unknown: uncultivated organism with predicted taxonomy: Clostridiales
  REGION 1..158: note = MG21-54 HNH domain
EMSRTFDERRKMEKRQDDNRAANERAKDQISEYKGDHATGLDIVKFKLYREQDGVCLYSGQNLDIARLFEPGYADVDHIIPYSRCFDDSYQNKVLVLASENRQKGNRLPYEYFGQDEARWHGYEVRVENLIHNYRKRQKLLKRRLTEEESTGFIDRNL

SEQ ID NO: 5200 - protein, 159 aa, unidentified
  REGION 1..159: note = Description of Unknown: uncultivated organism with predicted taxonomy: Ruminococcaceae bacterium TF06-43
  REGION 1..159: note = MG21-55 HNH domain
EMHHSIKERNRMKKRQEENREKNEQVKAQILETKPGTRVTGLDIVKFKLYQEQDGICLYSGKPMEIERLYEPGYAEVDHIIPYSRCFDDSYSNKVLVLAKENQQKGNCTPYEYFGADEQRWHEFSARVRASVRDFKKRQKLLNTSFGEEQGKEFIQRNL

SEQ ID NO: 5201 - protein, 158 aa, unidentified; identical to SEQ ID NO: 5173
  REGION 1..158: note = Description of Unknown: uncultivated organism with predicted taxonomy: Clostridiales bacterium 42_27
  REGION 1..158: note = MG21-56 HNH domain

SEQ ID NO: 5202 - protein, 158 aa, unidentified
  REGION 1..158: note = Description of Unknown: uncultivated organism
  REGION 1..158: note = MG21-57 HNH domain
EMGKNFKDRRMIETRQTDNAAKNERIKAQISEYKSDHITGQDIVKFKLFKEQDGICLYSGKSLNIARLFEPGYVDIDHIIPYSISFDDSYNNKVLVLSSENRQKGNRIPYAYFGQNSDRWEKYETLVNNTVRSYRKRKNLLLKSLSEAQIDGFKQRNL

SEQ ID NO: 5203 - protein, 158 aa, unidentified
  REGION 1..158: note = Description of Unknown: uncultivated organism with predicted taxonomy: Oscillibacter sp. CAG:241_62_21
  REGION 1..158: note = MG21-58 HNH domain
EMSQNFDERRKAEKRREENRAANERAKEQILEYKGDRVTGLDIVKFKLFREQDGVCLYSGKNLDISRLFEPGYADVDHIIPYSRCFDDSYQNKVLVLASENRQKGNRLPYEYFGQDAARWHGYEVRVENLIRNYRKRQKLLKHHLTEEESAGFIARNL

SEQ ID NO: 5204 - protein, 158 aa, unidentified; identical to SEQ ID NO: 5203
  REGION 1..158: note = Description of Unknown: uncultivated organism with predicted taxonomy: Clostridiales
  REGION 1..158: note = MG21-59 HNH domain

SEQ ID NO: 5205 - protein, 158 aa, unidentified; identical to SEQ ID NO: 5173
  REGION 1..158: note = Description of Unknown: uncultivated organism with predicted taxonomy: Firmicutes
  REGION 1..158: note = MG21-60 HNH domain

SEQ ID NO: 5206 - protein, 158 aa, unidentified; identical to SEQ ID NO: 5179
  REGION 1..158: note = Description of Unknown: uncultivated organism with predicted taxonomy: Clostridiales
  REGION 1..158: note = MG21-61 HNH domain

SEQ ID NO: 5207 - protein, 158 aa, unidentified; identical to SEQ ID NO: 5182
  REGION 1..158: note = Description of Unknown: uncultivated organism with predicted taxonomy: Firmicutes bacterium CAG:129
  REGION 1..158: note = MG21-62 HNH domain

SEQ ID NO: 5208 - protein, 158 aa, unidentified; identical to SEQ ID NO: 5184
  REGION 1..158: note = Description of Unknown: uncultivated organism with predicted taxonomy: Clostridiales
  REGION 1..158: note = MG21-63 HNH domain

SEQ ID NO: 5209 - protein, 158 aa, unidentified; identical to SEQ ID NO: 5184
  REGION 1..158: note = Description of Unknown: uncultivated organism with predicted taxonomy: Clostridiales
  REGION 1..158: note = MG21-64 HNH domain

SEQ ID NO: 5210 - protein, 158 aa, unidentified; identical to SEQ ID NO: 5172
  REGION 1..158: note = Description of Unknown: uncultivated organism with predicted taxonomy: Clostridiales bacterium 42_27
  REGION 1..158: note = MG21-65 HNH domain

SEQ ID NO: 5211 - protein, 158 aa, unidentified; identical to SEQ ID NO: 5184
  REGION 1..158: note = Description of Unknown: uncultivated organism with predicted taxonomy: Clostridiales
  REGION 1..158: note = MG21-66 HNH domain

SEQ ID NO: 5212 - protein, 158 aa, unidentified; identical to SEQ ID NO: 5174
  REGION 1..158: note = Description of Unknown: uncultivated organism with predicted taxonomy: Clostridia
  REGION 1..158: note = MG21-67 HNH domain

SEQ ID NO: 5213 - protein, 158 aa, unidentified; identical to SEQ ID NO: 5194
  REGION 1..158: note = Description of Unknown: uncultivated organism with predicted taxonomy: Clostridiales
  REGION 1..158: note = MG21-68 HNH domain

SEQ ID NO: 5214 - protein, 159 aa, unidentified
  REGION 1..159: note = Description of Unknown: uncultivated organism with predicted taxonomy: Firmicutes
  REGION 1..159: note = MG21-69 HNH domain
EMHHSIKERNRMKKRQEENREKNEQVKAQILETKPGTRVTGLDIVKFKLHQEQKGFCPYSGVEIKKERLYEPGYAEVDHIIPYSRCFDDSYSNKVLVLAEENRQKGNRTPYEYFGADEQRWHEFSARVRASVQDFKKRQKLLNTSFGEEQKNEFTQRNL

SEQ ID NO: 5215 - protein, 159 aa, unidentified
  REGION 1..159: note = Description of Unknown: uncultivated organism with predicted taxonomy: Firmicutes
  REGION 1..159: note = MG21-70 HNH domain
EMSHSFDERNKMKKRQEDGWRKNEQVKAQILETKTGNRVTGLDIVKFKLYQEQKGFCPYSGVEIKKERLYEPGYAEVDHIIPYSRCFDDSYSNKVLVLAEENRQKGNRTPYEYFGADEQRWHEFSARVRASVRDFKKRQKLLNTSFGEEQGKDFIQRNL

SEQ ID NO: 5216 - protein, 159 aa, unidentified; identical to SEQ ID NO: 5169
  REGION 1..159: note = Description of Unknown: uncultivated organism with predicted taxonomy: Clostridiales
  REGION 1..159: note = MG21-71 HNH domain

SEQ ID NO: 5217 - protein, 159 aa, unidentified; identical to SEQ ID NO: 5168
  REGION 1..159: note = Description of Unknown: uncultivated organism
  REGION 1..159: note = MG21-72 HNH domain

SEQ ID NO: 5218 - protein, 158 aa, unidentified; identical to SEQ ID NO: 5177
  REGION 1..158: note = Description of Unknown: uncultivated organism with predicted taxonomy: Clostridiales
  REGION 1..158: note = MG21-73 HNH domain

SEQ ID NO: 5219 - protein, 159 aa, unidentified
  REGION 1..159: note = Description of Unknown: uncultivated organism with predicted taxonomy: Firmicutes
  REGION 1..159: note = MG21-74 HNH domain
EMSHSFDERNKIKKRQEDGRRKNEQIKAQILETKAGHRVTGLDIVKFKLFQEQDGVCPYSGKALDVQRLYEPGYADVDHIIPYSRCFDDSYSNKVLVLASENRQKGNCTPYEYFGADERRWHEFSVRVGASVRDFKKRQKLLNTSFGEEQGKEFIQRNL

SEQ ID NO: 5220 - protein, 157 aa, unidentified
  REGION 1..157: note = Description of Unknown: uncultivated organism with predicted taxonomy: Clostridiales
  REGION 1..157: note = MG21-75 HNH domain
ELSKNFADRQNIKKNQENNMQSNEKAKEDILKLGKSNPTGQDIVKYKLWKEQDGICVYSGKRISIEDLFTEAVDVDHIIPYSMCFDDTYKNKVLVLSSENRQKGNRIPYQYMQEKGRDLDEYEIRVNNIIKNYSKKQRLLKQKFTREDANEWKDRNI

SEQ ID NO: 5221 - protein, 158 aa, unidentified; identical to SEQ ID NO: 5194
  REGION 1..158: note = Description of Unknown: uncultivated organism with predicted taxonomy: Clostridiales bacterium 42_27
  REGION 1..158: note = MG21-76 HNH domain

SEQ ID NO: 5222 - protein, 158 aa, unidentified
  REGION 1..158: note = Description of Unknown: uncultivated organism with predicted taxonomy: Clostridiales
  REGION 1..158: note = MG21-77 HNH domain
EMGKPYDVRTQITKKQEANAKKNEEVKQKIREIKGLEPTGQDIVKFKLFQDQNGVCLYSGQSLDITRLFEAGYVDVDHIIPYSISFDDSYTNKVLVRSPENRQKGNRIPADYFKSDPARWQRFETLVNTRVHNWKKKRNLLTQALSEEQKNGFKQRNL

SEQ ID NO: 5223 - protein, 158 aa, unidentified; identical to SEQ ID NO: 5194
  REGION 1..158: note = Description of Unknown: uncultivated organism with predicted taxonomy: Clostridiales bacterium 42_27
  REGION 1..158: note = MG21-78 HNH domain

SEQ ID NO: 5224 - protein, 158 aa, unidentified; identical to SEQ ID NO: 5199
  REGION 1..158: note = Description of Unknown: uncultivated organism with predicted taxonomy: Clostridiales
  REGION 1..158: note = MG21-79 HNH domain

SEQ ID NO: 5225 - protein, 158 aa, unidentified
  REGION 1..158: note = Description of Unknown: uncultivated organism with predicted taxonomy: Clostridiales
  REGION 1..158: note = MG21-80 HNH domain
EMGKNFKDRRMIETRQTDNAAKNERIKAQISEYKSDHITGQDIVKFKLFKEQDGICLYSGKSLDIARLFEPGYVDIDHIIPYSISFDDSYNNKVLVQSSENRQKGNRIPYAYFGQNSDRWEKYETLVNNTVRSYRKRKNLLLKSLSEAQIDGFKQRNL

SEQ ID NO: 5226 - protein, 158 aa, unidentified
  REGION 1..158: note = Description of Unknown: uncultivated organism with predicted taxonomy: Clostridiales
  REGION 1..158: note = MG21-81 HNH domain
EMSQNFEERRKTEKRQDENRTANEKAKEQIAEYKGDRATGLDIVKFKLYREQDGVCLYSGRNLDLSRLFEPGYVDVDHIIPYSRCFDDSYQNKVLVLASENRQKGNRLPYEYFGQDETRWHEYEVRVENLIRNYRKRQKLLKKRLTEEESAGFIDRNL

SEQ ID NO: 5227 - protein, 158 aa, unidentified; identical to SEQ ID NO: 5194
  REGION 1..158: note = Description of Unknown: uncultivated organism with predicted taxonomy: Clostridiales bacterium 42_27
  REGION 1..158: note = MG21-82 HNH domain

SEQ ID NO: 5228 - protein, 158 aa, unidentified; identical to SEQ ID NO: 5194
  REGION 1..158: note = Description of Unknown: uncultivated organism with predicted taxonomy: Clostridiales bacterium 42_27
  REGION 1..158: note = MG21-83 HNH domain

SEQ ID NO: 5229 - protein, 158 aa, unidentified; identical to SEQ ID NO: 5184
  REGION 1..158: note = Description of Unknown: uncultivated organism with predicted taxonomy: Clostridiales
  REGION 1..158: note = MG21-84 HNH domain

SEQ ID NO: 5230 - protein, 158 aa, unidentified
  REGION 1..158: note = Description of Unknown: uncultivated organism with predicted taxonomy: Clostridiales
  REGION 1..158: note = MG21-85 HNH domain
EMGKSKADRDKIDAEQKANAKRNEELRQQIKKIKGAEPTGQDIVKFKLFQDQNGVCLYSGQNLDITRLFEAGYVEIDHIIPYSISLDNSYANKVLVLKEENQNKGRRTPYEYFGADSKRWQRFETLVNTQVHNWKKKRNLLTQALSEEQKNGFKQRNL

SEQ ID NO: 5231 - protein, 158 aa, unidentified; identical to SEQ ID NO: 5226
  REGION 1..158: note = Description of Unknown: uncultivated organism with predicted taxonomy: Firmicutes
  REGION 1..158: note = MG21-86 HNH domain

SEQ ID NO: 5232 - protein, 158 aa, unidentified; identical to SEQ ID NO: 5179
  REGION 1..158: note = Description of Unknown: uncultivated organism with predicted taxonomy: Clostridiales
  REGION 1..158: note = MG21-87 HNH domain

SEQ ID NO: 5233 - protein, 158 aa, unidentified; identical to SEQ ID NO: 5178
  REGION 1..158: note = Description of Unknown: uncultivated organism with predicted taxonomy: Clostridiales
  REGION 1..158: note = MG21-88 HNH domain

SEQ ID NO: 5234 - protein, 158 aa, unidentified; identical to SEQ ID NO: 5179
  REGION 1..158: note = Description of Unknown: uncultivated organism with predicted taxonomy: Clostridiales
  REGION 1..158: note = MG21-89 HNH domain

SEQ ID NO: 5235 - protein, 158 aa, unidentified; identical to SEQ ID NO: 5194
  REGION 1..158: note = Description of Unknown: uncultivated organism with predicted taxonomy: Clostridiales bacterium 42_27
  REGION 1..158: note = MG21-90 HNH domain

SEQ ID NO: 5236 - protein, 158 aa, unidentified; identical to SEQ ID NO: 5194
  REGION 1..158: note = Description of Unknown: uncultivated organism with predicted taxonomy: Clostridiales bacterium 42_27
  REGION 1..158: note = MG21-91 HNH domain

SEQ ID NO: 5237 - protein, 158 aa, unidentified; identical to SEQ ID NO: 5179
  REGION 1..158: note = Description of Unknown: uncultivated organism with predicted taxonomy: Ruminococcaceae bacterium TF06-43
  REGION 1..158: note = MG21-92 HNH domain

SEQ ID NO: 5238 - protein, 158 aa, unidentified; identical to SEQ ID NO: 5179
  REGION 1..158: note = Description of Unknown: uncultivated organism with predicted taxonomy: Ruminococcaceae bacterium TF06-43
  REGION 1..158: note = MG21-93 HNH domain

SEQ ID NO: 5239 - protein, 158 aa, unidentified; identical to SEQ ID NO: 5184
  REGION 1..158: note = Description of Unknown: uncultivated organism with predicted taxonomy: Clostridiales
  REGION 1..158: note = MG21-94 HNH domain

SEQ ID NO: 5240 - protein, 158 aa, unidentified; identical to SEQ ID NO: 5194
  REGION 1..158: note = Description of Unknown: uncultivated organism with predicted taxonomy: Clostridiales bacterium 42_27
  REGION 1..158: note = MG21-95 HNH domain

SEQ ID NO: 5241 - protein, 158 aa, unidentified; identical to SEQ ID NO: 5194
  REGION 1..158: note = Description of Unknown: uncultivated organism with predicted taxonomy: Clostridiales bacterium 42_27
  REGION 1..158: note = MG21-96 HNH domain

SEQ ID NO: 5242 - protein, 157 aa, unidentified; identical to SEQ ID NO: 5189
  REGION 1..157: note = Description of Unknown: uncultivated organism with predicted taxonomy: Clostridium
  REGION 1..157: note = MG21-97 HNH domain

SEQ ID NO: 5243 - protein, 160 aa, unidentified
  REGION 1..160: note = Description of Unknown: uncultivated organism with predicted taxonomy: Clostridiales
  REGION 1..160: note = MG21-98 HNH domain
EMGKSKADRDKIDAEQKANAKRNEELRQQIKKIKGAEPTGQDIVKFKLFQEQKGVCLYSGKNIEIDRLFKPEAGYVEIDHIIPYSISLDNSYANKVLVLKEENQNKGRRTPYEYFGADSKRWQRFETLVNTQVHNWKKKRNLLTQALSEEQKNGFKQRNL

SEQ ID NO: 5244 - protein, 158 aa, unidentified; identical to SEQ ID NO: 5173
  REGION 1..158: note = Description of Unknown: uncultivated organism with predicted taxonomy: Clostridiales bacterium 42_27
  REGION 1..158: note = MG21-99 HNH domain

SEQ ID NO: 5245 - protein, 158 aa, unidentified
  REGION 1..158: note = Description of Unknown: uncultivated organism with predicted taxonomy: Clostridiales
  REGION 1..158: note = MG21-100 HNH domain
EMSRNFDERRKAEKRQDENRAANERAKEQIAEYKGDHATGLDIVKFKLYQEQDGVYLYSGKNLDPSRLFEPGYADVDHIVPYSRCFDDSYQNKVLVLASENRQKGNRLPYEYFGYDEVRWHEYEVRVENLIRNYRKRQKLLKRQLSEEESAEFIDRNL

SEQ ID NO: 5246 - protein, 157 aa, unidentified
  REGION 1..157: note = Description of Unknown: uncultivated organism with predicted taxonomy: Clostridiales
  REGION 1..157: note = MG21-101 HNH domain
ELSKNFADRQNIKKNQENNMQSNEKAKEDILKLGKSNPTGQDIVKYKLWKEQDGTCVYSGKHISIEDLFTEAVDVDHIIPYSMCFDDTYKNKVLVLSSENRQKGNRIPYQYMQEKGRDLDEYEIRVNNIIKNYSKKQRLLKQKFTREDANEWKDRNI

SEQ ID NO: 5247 - protein, 157 aa, unidentified; identical to SEQ ID NO: 5189
  REGION 1..157: note = Description of Unknown: uncultivated organism with predicted taxonomy: Clostridium
  REGION 1..157: note = MG21-102 HNH domain

SEQ ID NO: 5248 - protein, 158 aa, unidentified
  REGION 1..158: note = Description of Unknown: uncultivated organism with predicted taxonomy: Clostridiales
  REGION 1..158: note = MG21-103 HNH domain
EMSRNFDERRKAEKRQDENRAANERAKEQIAEYKGDHATGLDIVKFKLYQEQDGVCLYSGKNLDPSRLFEPGYADVDHIVPYSRCFDDSYQNKVLVLASENRQKGNRLPYEYFGQDEARWHGYEVRVENLIRNYRKRQKLLKRQLSEEESAGFIDRNL

SEQ ID NO: 5249 - protein, 158 aa, unidentified; identical to SEQ ID NO: 5194
  REGION 1..158: note = Description of Unknown: uncultivated organism with predicted taxonomy: Clostridiales bacterium 42_27
  REGION 1..158: note = MG21-104 HNH domain

SEQ ID NO: 5250 - protein, 158 aa, unidentified; identical to SEQ ID NO: 5197
  REGION 1..158: note = Description of Unknown: uncultivated organism with predicted taxonomy: Clostridiales bacterium 42_27
  REGION 1..158: note = MG21-105 HNH domain

SEQ ID NO: 5251 - protein, 158 aa, unidentified; identical to SEQ ID NO: 5203
  REGION 1..158: note = Description of Unknown: uncultivated organism with predicted taxonomy: Oscillibacter sp. CAG:241_62_21
  REGION 1..158: note = MG21-106 HNH domain

SEQ ID NO: 5252 - protein, 157 aa, unidentified; identical to SEQ ID NO: 5189
  REGION 1..157: note = Description of Unknown: uncultivated organism with predicted taxonomy: Clostridium
  REGION 1..157: note = MG21-107 HNH domain

SEQ ID NO: 5253 - protein, 158 aa, unidentified; identical to SEQ ID NO: 5179
  REGION 1..158: note = Description of Unknown: uncultivated organism with predicted taxonomy: Clostridiales
  REGION 1..158: note = MG21-108 HNH domain

SEQ ID NO: 5254 - protein, 158 aa, unidentified; identical to SEQ ID NO: 5197
  REGION 1..158: note = Description of Unknown: uncultivated organism with predicted taxonomy: Clostridiales bacterium 42_27
  REGION 1..158: note = MG21-109 HNH domain

SEQ ID NO: 5255 - protein, 158 aa, unidentified; identical to SEQ ID NO: 5203
  REGION 1..158: note = Description of Unknown: uncultivated organism with predicted taxonomy: Oscillibacter sp. CAG:241_62_21
  REGION 1..158: note = MG21-110 HNH domain

SEQ ID NO: 5256 - protein, 158 aa, unidentified; identical to SEQ ID NO: 5248
  REGION 1..158: note = Description of Unknown: uncultivated organism with predicted taxonomy: Clostridiales
  REGION 1..158: note = MG21-111 HNH domain

SEQ ID NO: 5257 - protein, 158 aa, unidentified; identical to SEQ ID NO: 5173
  REGION 1..158: note = Description of Unknown: uncultivated organism with predicted taxonomy: Clostridiales bacterium 42_27
  REGION 1..158: note = MG21-112 HNH domain

SEQ ID NO: 5258 - protein, 158 aa, unidentified; identical to SEQ ID NO: 5194
  REGION 1..158: note = Description of Unknown: uncultivated organism with predicted taxonomy: Clostridiales bacterium 42_27
  REGION 1..158: note = MG21-113 HNH domain

SEQ ID NO: 5259 - protein, 158 aa, unidentified; identical to SEQ ID NO: 5197
  REGION 1..158: note = Description of Unknown: uncultivated organism with predicted taxonomy: Clostridiales bacterium 42_27
  REGION 1..158: note = MG21-114 HNH domain

SEQ ID NO: 5260 - protein, 158 aa, unidentified
  REGION 1..158: note = Description of Unknown: uncultivated organism with predicted taxonomy: Clostridiales
  REGION 1..158: note = MG21-115 HNH domain
EMGKPYDVRTQMTKKQETNAKRNEELRQQIKKIKGAEPTGQDIVKFKLFQDQNGVCLYSGQNLDITRLFEAGYVDVDHIIPYSISFDDSYTNKVLVRSPENRQKGNRIPADYFKSDPARWQRFETLVNTQVHNWKKKRNLLTQVLSEEQKNGFKQRNL

SEQ ID NO: 5261 - protein, 158 aa, unidentified; identical to SEQ ID NO: 5179
  REGION 1..158: note = Description of Unknown: uncultivated organism with predicted taxonomy: Clostridiales
  REGION 1..158: note = MG21-116 HNH domain

SEQ ID NO: 5262 - protein, 158 aa, unidentified; identical to SEQ ID NO: 5173
  REGION 1..158: note = Description of Unknown: uncultivated organism with predicted taxonomy: Clostridiales bacterium 42_27
  REGION 1..158: note = MG21-117 HNH domain

SEQ ID NO: 5263 - protein, 158 aa, unidentified; identical to SEQ ID NO: 5170
  REGION 1..158: note = Description of Unknown: uncultivated organism with predicted taxonomy: Clostridiales bacterium 42_27
  REGION 1..158: note = MG21-118 HNH domain

SEQ ID NO: 5264 - protein, 158 aa, unidentified; identical to SEQ ID NO: 5194
  REGION 1..158: note = Description of Unknown: uncultivated organism with predicted taxonomy: Clostridiales bacterium 42_27
  REGION 1..158: note = MG21-119 HNH domain

SEQ ID NO: 5265 - protein, 158 aa, unidentified; identical to SEQ ID NO: 5179
  REGION 1..158: note = Description of Unknown: uncultivated organism with predicted taxonomy: Ruminococcaceae bacterium TF06-43
  REGION 1..158: note = MG21-120 HNH domain

SEQ ID NO: 5266 - protein, 158 aa, unidentified; identical to SEQ ID NO: 5248
  REGION 1..158: note = Description of Unknown: uncultivated organism with predicted taxonomy: Clostridiales
  REGION 1..158: note = MG21-121 HNH domain

SEQ ID NO: 5267 - protein, 159 aa, unidentified; identical to SEQ ID NO: 5214
  REGION 1..159: note = Description of Unknown: uncultivated organism
  REGION 1..159: note = MG21-122 HNH domain

SEQ ID NO: 5268 - protein, 158 aa, unidentified; identical to SEQ ID NO: 5173
  REGION 1..158: note = Description of Unknown: uncultivated organism with predicted taxonomy: Clostridiales
  REGION 1..158: note = MG21-123 HNH domain

SEQ ID NO: 5269 - protein, 158 aa, unidentified; identical to SEQ ID NO: 5173
  REGION 1..158: note = Description of Unknown: uncultivated organism with predicted taxonomy: Clostridiales bacterium 42_27
  REGION 1..158: note = MG21-124 HNH domain

SEQ ID NO: 5270 - protein, 158 aa, unidentified; identical to SEQ ID NO: 5173
  REGION 1..158: note = Description of Unknown: uncultivated organism with predicted taxonomy: Clostridiales bacterium 42_27
  REGION 1..158: note = MG21-125 HNH domain

SEQ ID NO: 5271 - protein, 158 aa, unidentified; identical to SEQ ID NO: 5194
  REGION 1..158: note = Description of Unknown: uncultivated organism with predicted taxonomy: Clostridiales bacterium 42_27
  REGION 1..158: note = MG21-126 HNH domain

SEQ ID NO: 5272 - protein, 158 aa, unidentified
  REGION 1..158: note = Description of Unknown: uncultivated organism with predicted taxonomy: Clostridiales bacterium 42_27
  REGION 1..158: note = MG21-127 HNH domain
EMSRTFDERRKMEKRQDDNRAANERAKDQIAEYKGDHATGLDIVKFKLYREQDGVCLYSGQNLDIARLFEPGYADVDHIIPYSRCFDDSYQNKVLVLASENRQKGNRLPYEYFGQDEARWHGYEVRVENLIHNYRKRQKLLKRRLNEEESTGFIDRNL

SEQ ID NO: 5273 - protein, 158 aa, unidentified; identical to SEQ ID NO: 5194
  REGION 1..158: note = Description of Unknown: uncultivated organism with predicted taxonomy: Clostridiales bacterium 42_27
  REGION 1..158: note = MG21-128 HNH domain

SEQ ID NO: 5274 - protein, 158 aa, unidentified
  REGION 1..158: note = Description of Unknown: uncultivated organism with predicted taxonomy: Clostridiales bacterium 42_27
  REGION 1..158: note = MG21-129 HNH domain
EMSRTFDERRKMEKRQDDNRAANERAKDQIAEYKGDHATGLDIVKFKLYREQDGVCLYSGQNLDIARLFEPGYADVDHIIPYSRCFDDSYQNKVLVLASENRQKGNRLPYEYFGQDEARWHGYEVRVENLIHNYRKRQKLLKRRLTEEESSGFIARNL

SEQ ID NO: 5275 - protein, 158 aa, unidentified
  REGION 1..158: note = Description of Unknown: uncultivated organism with predicted taxonomy: Clostridiales bacterium 42_27
  REGION 1..158: note = MG21-130 HNH domain
EMSRTFDERRKMEKRQDDNRAANERAKDQIAEYKGAHATGLDIVKFKLYQEQDGVCLYSGQNLDIARLFEPGYADVDHIIPYSRCFDDSYQNKVLVLASENRQKGNRLPYEYFGQDEARWHGYEVRVENLIHNYRKRQKLLKRRLTEEESSGFIDRNL

SEQ ID NO: 5276 - protein, 158 aa, unidentified; identical to SEQ ID NO: 5194
  REGION 1..158: note = Description of Unknown: uncultivated organism with predicted taxonomy: Clostridiales bacterium 42_27
  REGION 1..158: note = MG21-131 HNH domain

SEQ ID NO: 5277 - protein, 158 aa, unidentified; identical to SEQ ID NO: 5173
  REGION 1..158: note = Description of Unknown: uncultivated organism with predicted taxonomy: Clostridiales bacterium 42_27
  REGION 1..158: note = MG21-132 HNH domain

SEQ ID NO: 5278 - protein, 158 aa, unidentified; identical to SEQ ID NO: 5203
  REGION 1..158: note = Description of Unknown: uncultivated organism with predicted taxonomy: Clostridiales
  REGION 1..158: note = MG21-133 HNH domain

SEQ ID NO: 5279 - protein, 158 aa, unidentified; identical to SEQ ID NO: 5194
  REGION 1..158: note = Description of Unknown: uncultivated organism with predicted taxonomy: Clostridiales bacterium 42_27
  REGION 1..158: note = MG21-134 HNH domain

SEQ ID NO: 5280 - protein, 158 aa, unidentified; identical to SEQ ID NO: 5173
  REGION 1..158: note = Description of Unknown: uncultivated organism with predicted taxonomy: Clostridiales
  REGION 1..158: note = MG21-135 HNH domain

SEQ ID NO: 5281 - protein, 159 aa, unidentified; identical to SEQ ID NO: 5153
  REGION 1..159: note = Description of Unknown: uncultivated organism with predicted taxonomy: Clostridiales
  REGION 1..159: note = MG21-136 HNH domain

SEQ ID NO: 5282 - protein, 157 aa, unidentified; identical to SEQ ID NO: 5246
  REGION 1..157: note = Description of Unknown: uncultivated organism with predicted taxonomy: Clostridiales
  REGION 1..157: note = MG21-137 HNH domain

SEQ ID NO: 5283 - protein, 158 aa, unidentified; identical to SEQ ID NO: 5173
  REGION 1..158: note = Description of Unknown: uncultivated organism with predicted taxonomy: Clostridiales bacterium 42_27
  REGION 1..158: note = MG21-138 HNH domain

SEQ ID NO: 5284 - protein, 158 aa, unidentified; identical to SEQ ID NO: 5173
  REGION 1..158: note = Description of Unknown: uncultivated organism with predicted taxonomy: Clostridiales
  REGION 1..158: note = MG21-139 HNH domain

SEQ ID NO: 5285 - protein, 158 aa, unidentified; identical to SEQ ID NO: 5194
  REGION 1..158: note = Description of Unknown: uncultivated organism with predicted taxonomy: Clostridiales bacterium 42_27
  REGION 1..158: note = MG21-140 HNH domain

SEQ ID NO: 5286 - protein, 159 aa, unidentified
  REGION 1..159: note = Description of Unknown: uncultivated organism with predicted taxonomy: Firmicutes
  REGION 1..159: note = MG21-141 HNH domain
EMSHSFDERNKMKKRQEDGRQENEQVKAQILETKAGDRVTGLDIVKFKLYREQDGVCLYSGKGLDLQRLYEPGYADVDHIIPYSRCFDDSYSNKVLVLASENRQKGNCTPYEYFGENEQRWHEFSVRVGASVRDFKKRQKLLNTSFGEEQGKNFIQRNL

SEQ ID NO: 5287 - protein, 158 aa, unidentified; identical to SEQ ID NO: 5173
  REGION 1..158: note = Description of Unknown: uncultivated organism with predicted taxonomy: Clostridiales bacterium 42_27
  REGION 1..158: note = MG21-142 HNH domain

SEQ ID NO: 5288 - protein, 158 aa, unidentified; identical to SEQ ID NO: 5197
  REGION 1..158: note = Description of Unknown: uncultivated organism with predicted taxonomy: Clostridiales bacterium 42_27
  REGION 1..158: note = MG21-143 HNH domain

SEQ ID NO: 5289 - protein, 158 aa, unidentified
  REGION 1..158: note = Description of Unknown: uncultivated organism with predicted taxonomy: Clostridiales
  REGION 1..158: note = MG21-144 HNH domain
EMGKPYDVRTQMTKKQEANAKRNEELRQQIKKIKGAEPTGQDIVKFKLFQDQNGVCLYSGQNLDITRLFEAGYVDVDHIIPYSISFDDSYTNKVLVRSPENRQKGNRIPADYFKSDPARWKRFETLVNTQVHNWKKKRNLLTQVLSEEQKNGFKQRNL

SEQ ID NO: 5290 - protein, 158 aa, unidentified
  REGION 1..158: note = Description of Unknown: uncultivated organism with predicted taxonomy: Clostridiales
  REGION 1..158: note = MG21-145 HNH domain
ELGKTFDERSKQEKRINENAARNEQAREQIREYKSGDSTGLDIVKFKLFQEQNGVCLYSGKNLDISRLFEAGYVDVDHIIPYSISFDDSYSNKVLVLAGENRQKGNRIPYQYFGNDRERWNRFETLVGTQIRSFKKRKNLLIRSLGEAQIEGFRQRNL

SEQ ID NO: 5291 - protein, 218 aa, unidentified
  REGION 1..218: note = Description of Unknown: uncultivated organism with predicted taxonomy: Bacteroidales
  REGION 1..218: note = MG22-1 HNH domain
DLKNTAEERSRIFRRNSENEDTIFRIKLLLEEFYANEKDIKDVRPYSPSQQELLRIYEEGVWQQEKDIPQDIKDIKKRISNDKDIKDITPNDIQRYRIWMDQKYCSPYTGKTIPLSRLFTTDYEIEHVIPRSRYFDDSYNNKVICEAAVNKDKNNRLGMEYIMAAGGKTIELGNGKNVQILKEEEYVELVDKIFGSNTRKRNIMLADEITEEFSHRQL

SEQ ID NO: 5292 - protein, 229 aa, unidentified
  REGION 1..229: note = Description of Unknown: uncultivated organism with predicted taxonomy: Bacteroidales
  REGION 1..229: note = MG22-3 HNH domain
DLKNTAEQRARIMRRNRENEMTNFRIKLLLQELHDCQPDIEGIRPYSPSQQELLRLYEETVWESESGKLGGKEASKDIPDDIKKIRDLLSKPSDKPIPQSAIQRYRLWLDQKYLSPYTGRPIPLARLFTADYEIEHIIPRSIFFDDSYANKVICESAVNKLKNNRLGMQFIREMDGRVETVKLGEGRETSILSVDGYVDLVNDLFRNNPRKRNNLLAEEITEDFCHRQL

SEQ ID NO: 5293 - protein, 229 aa, unidentified; identical to SEQ ID NO: 5292
  REGION 1..229: note = Description of Unknown: uncultivated organism with predicted taxonomy: Bacteroidales
  REGION 1..229: note = MG22-4 HNH domain

SEQ ID NO: 5294 - protein, 218 aa, unidentified
  REGION 1..218: note = Description of Unknown: uncultivated organism with predicted taxonomy: Bacteroidales
  REGION 1..218: note = MG22-5 HNH domain
DLKNTAEERSRIFRRNSENEDTNFRIKLLLEEFYANEKDIIDVRPYSPSQQELLRIYEEGVWQQEKDIPQDIKDIKKRISNDKDIKDITPNDIQRYRIWMDQKYCSPYTGKTIPLSRLFTTDYEIEHVIPRSRYFDDSYNNKVICEAAVNKDKNNRLGMEYIMAAGGKTIELGNGKNVQILKEEEYVELVDKIFGNNTRKRNIMLADEITEEFSHRQL

SEQ ID NO: 5295 - protein, 218 aa, unidentified
  REGION 1..218: note = Description of Unknown: uncultivated organism with predicted taxonomy: Bacteroidales
  REGION 1..218: note = MG22-6 HNH domain
DLKNTAEERSRIFRRNSENEDTNFRIKLLLEEFYANEKDIKDVRPYSPSQQELLRIYEEGVWLQEKDIPQDIKDIKKRISNDKDIKDITPNDIQRYRIWMDQKYCSPYTGKTIPLSRLFTTDYEIEHVIPRSRYFDDSYNNKVICEAAVNKDKNNRLGMEYIMAAGGKTIELGNGKNVQILKEEEYVELVDKIFGNNTRKRNIMLTDEITEDFSHRQL

SEQ ID NO: 5296 - protein, 218 aa, unidentified; identical to SEQ ID NO: 5294
  REGION 1..218: note = Description of Unknown: uncultivated organism with predicted taxonomy: Prevotella
  REGION 1..218: note = MG22-7 HNH domain

SEQ ID NO: 5297 - protein, 218 aa, unidentified; identical to SEQ ID NO: 5295
  REGION 1..218: note = Description of Unknown: uncultivated organism with predicted taxonomy: Bacteroidales
  REGION 1..218: note = MG22-8 HNH domain

SEQ ID NO: 5298 - protein, 218 aa, unidentified
  REGION 1..218: note = Description of Unknown: uncultivated organism with predicted taxonomy: Bacteroidales
  REGION 1..218: note = MG22-9 HNH domain
DLKNTAEERSRIFRRNSENEDTNFRIKLLLEEFYTNEEDMEGIRPYSPSQQELLRIYEEGVWQQEKEIPQDIKDIKKKLSSDKDINEITHSDVQRYRIWMDQKYCSPYTGNPIPLSRLFTPDYEIEHVIPRSRYFDDSYNNKVICEAAVNKDKNNRLGMEYIMEAGGKTIELGNGKNVQVLKEREYVELVNEVFKNNTRKRNILLADEIPEDFSHRQL

SEQ ID NO: 5299 - protein, 218 aa, unidentified
  REGION 1..218: note = Description of Unknown: uncultivated organism with predicted taxonomy: Bacteroidales
  REGION 1..218: note = MG22-10 HNH domain
DLKNTAEERSRIFRRNSENEDTNFRIKLLLEEFYANEKDIKDVRPYSPSQQELLRIYEEGVWQQEKDIPQDIKDIKKRISNDKDIKDITPNDIQRYRIWMDQKYCSPYTGKTIPLSRLFTTDYEIEHVIPRSRYFDDSYNNKVICEAAVNKDKNNRLGMEYIMAAGGKTIELGNGKNVQILKEEEYVELVDKIFGNNTRKRNIMLADEITEEFSHRQL

SEQ ID NO: 5300 - protein, 179 aa, unidentified
  REGION 1..179: note = Description of Unknown: uncultivated organism with predicted taxonomy: Prevotella
  REGION 1..179: note = MG22-11 HNH domain
DLKNSAAERAKISNRNKQNEGTNFRIKLLLQEFSQYEKDIEGIRPYSPSQQELLRIYEEGVCEQTEMPKDIAKIRRELSSSSEKDVKRSDIQRYRLWLDQKYCSPYTGQPIPLARLFTTDYEIEHVIPRSKYFDDSYNNKVICEAAVNKAKSNRLGMAFIQESGGQIIPLGNGRNVQVL

SEQ ID NO: 5301 - protein, 218 aa, unidentified; identical to SEQ ID NO: 5299
  REGION 1..218: note = Description of Unknown: uncultivated organism with predicted taxonomy: Prevotella sp. MGM2
  REGION 1..218: note = MG22-12 HNH domain

SEQ ID NO: 5302 - protein, 218 aa, unidentified
  REGION 1..218: note = Description of Unknown: uncultivated organism with predicted taxonomy: Prevotella
  REGION 1..218: note = MG22-13 HNH domain
DLENTAEERSRIFRRNSENEDTNFRIKLLLEEFYANEKDIKDVRPYSPSQQELLRIYEEGVWQQEKDIPQDIKDIKKRISNDKDIKDITPNDIQRYRIWMDQKYCSPYTGKTIPLSRLFTTDYEIEHVIPRSRYFDDSYNNKVICEAAVNKDKNNRLGMEYIMAAGGKTIELGNGKNVQILKKEEYVELVDKIFGNNTRKRNIMLADEITEDFSHRQL

SEQ ID NO: 5303 - protein, 23 aa, unidentified
  REGION 1..23: note = Description of Unknown: uncultivated organism with predicted taxonomy: Bacteroides ndongoniae
  REGION 1..23: note = MG22-14 HNH domain
DLKNTAEERSRIFRRNSENEDTN

SEQ ID NO: 5304 - protein, 218 aa, unidentified
  REGION 1..218: note = Description of Unknown: uncultivated organism with predicted taxonomy: Prevotella sp. MGM2
  REGION 1..218: note = MG22-15 HNH domain
DLKNTAEERSRIFRRNSENEDTNFRIKLLLEEFYANEKDIKDVRPYSPSQQELLRIYEEGVWQQEKDIPQDIKDIKKRISNDKDIKDITPNDIQRYRIWMDQKYCSPYTGKTIPLSRLFTTDYEIEHVIPRSRYFDDSYNNKVICEAAVNKDKNNRLGMEYIIAAGGKTIELGNGKNVQILKEEEYVELVDKIFGNNTRKRNIMLADEITEEFSHRQL

SEQ ID NO: 5305 - protein, 218 aa, unidentified
  REGION 1..218: note = Description of Unknown: uncultivated organism with predicted taxonomy: Prevotella sp. MGM2
  REGION 1..218: note = MG22-16 HNH domain
DLKNTAEERSKIFRRNSENEDTNFRIKLLLEEFYANEKDIKDVRPYSPSQQELLRIYEEGVWQQEKDIPQDIKDIKKRISNDKDIKDITPNDIQRYRIWMDQKYCSPYTGKTIPLSRLFTTDYEIEHVIPRSRYFDDSYNNKVICEAAVNKDKNNRLGMEYIIAAGGKTIELGNGKNVQILKEEEYVELVDKIFGNNTRKRNIMLADEITEEFSHRQL

SEQ ID NO: 5306 - protein, 218 aa, unidentified; identical to SEQ ID NO: 5304
  REGION 1..218: note = Description of Unknown: uncultivated organism with predicted taxonomy: Prevotella
  REGION 1..218: note = MG22-17 HNH domain

SEQ ID NO: 5307 - protein, 218 aa, unidentified; identical to SEQ ID NO: 5305
  REGION 1..218: note = Description of Unknown: uncultivated organism with predicted taxonomy: Bacteroidales
  REGION 1..218: note = MG22-18 HNH domain

SEQ ID NO: 5308 - protein, 218 aa, unidentified; identical to SEQ ID NO: 5299
  REGION 1..218: note = Description of Unknown: uncultivated organism with predicted taxonomy: Prevotella
  REGION 1..218: note = MG22-19 HNH domain

SEQ ID NO: 5309 - protein, 163 aa, unidentified
  REGION 1..163: note = Description of Unknown: uncultivated organism with predicted taxonomy: Prevotella sp. MGM2
  REGION 1..163: note = MG22-20 HNH domain
DLKNTAEERSRIFRRNSENEDTNFRIKLLLEEFYANEKDIKDVRPYSPSQQELLRIYEEGVWQQEKDIPQDIKDIKKRISNDKDIKDITPNDIQRYRIWMDQKYCSPYTGKTIPLSRLFTTDYEIEHVIPRSRYFDDSYNNKVICEAAVNKDKNNRLGMEYIM

SEQ ID NO: 5310 - protein, 218 aa, unidentified; identical to SEQ ID NO: 5299
  REGION 1..218: note = Description of Unknown: uncultivated organism with predicted taxonomy: Bacteroidales
  REGION 1..218: note = MG22-21 HNH domain

SEQ ID NO: 5311 - protein, 218 aa, unidentified; identical to SEQ ID NO: 5302
  REGION 1..218: note = Description of Unknown: uncultivated organism with predicted taxonomy: Bacteroidales
  REGION 1..218: note = MG22-22 HNH domain

SEQ ID NO: 5312 - protein, 217 aa, unidentified
  REGION 1..217: note = Description of Unknown: uncultivated organism with predicted taxonomy: Bacteroidales
  REGION 1..217: note = MG22-23 HNH domain
DLKNSAAERAKISNRNKQNEGTNFRIKLLLQEFSQYEKDIEGIRPYSPSQQELLRIYEKGVCEQTEMPKDIAKIRRELSSSSSEKDVKRSDIQRYRLWLDQKYCSPYTGQPIPLARLFTTDYEIEHVIPRSKYFDDSYNNKVICEAAVNKAKSNRLGMAFIQESGGQIIPLGNGRNVQVLNESAYVEFINKTFKHNARKRSLMLADEITEEFCHRQL

SEQ ID NO: 5313 - protein, 218 aa, unidentified
  REGION 1..218: note = Description of Unknown: uncultivated organism with predicted taxonomy: Bacteroidales
  REGION 1..218: note = MG22-24 HNH domain
DLKNTAEERSRIFRRNSENEDTNFRIKLLLEEFNANEKDIKDVRPYSPSQQELLRIYEEGVWQQEKDIPQDIKDIKKRISNDKDIKDITPNDIQRYRIWMDQKYCSPYTGKTIPLSRLFTTDYEIEHVIPRSRYFDDSYNNKVICEAAVNKDKNNRLGMEYIMAAGGKTIELGNGKNVQILKEEEYVELVDKIFGNNTRKRNIMLANEITEEFSHRQL

SEQ ID NO: 5314 - protein, 218 aa, unidentified; identical to SEQ ID NO: 5299
  REGION 1..218: note = Description of Unknown: uncultivated organism with predicted taxonomy: Prevotella sp. MGM2
  REGION 1..218: note = MG22-25 HNH domain

SEQ ID NO: 5315 - protein, 218 aa, unidentified
  REGION 1..218: note = Description of Unknown: uncultivated organism with predicted taxonomy: Bacteroidales
  REGION 1..218: note = MG22-26 HNH domain
DLKNTAEERSRIFRRNNENEDTNFRIKLLLEEFYANEKDIKDVRPYSPSQQELLRIYEEGVWQQEKDIPQDIKDIKKRISNDKDIKDITPNDIQRYRIWMDQKYCSPYTGKTIPLSRLFTTDYEIEHVIPRSRYFDDSYNNKVICEAAVNKDKNNRLGMEYIMAAGGKTIELGNGKNVQILKEEEYVELVDKIFGNNTRKRNIMLADEITEEFSHRQL

SEQ ID NO: 5316 - protein, 218 aa, unidentified; identical to SEQ ID NO: 5299
  REGION 1..218: note = Description of Unknown: uncultivated organism with predicted taxonomy: Prevotella sp. MGM2
  REGION 1..218: note = MG22-27 HNH domain

SEQ ID NO: 5317 - protein, 218 aa, unidentified; identical to SEQ ID NO: 5304
  REGION 1..218: note = Description of Unknown: uncultivated organism with predicted taxonomy: Bacteroidales
  REGION 1..218: note = MG22-28 HNH domain

SEQ ID NO: 5318 - protein, 218 aa, unidentified; identical to SEQ ID NO: 5299
  REGION 1..218: note = Description of Unknown: uncultivated organism with predicted taxonomy: Bacteroidales
  REGION 1..218: note = MG22-29 HNH domain

SEQ ID NO: 5319 - protein, 206 aa, unidentified
  REGION 1..206: note = Description of Unknown: uncultivated organism with predicted taxonomy: Prevotella sp. MGM2
  REGION 1..206: note = MG22-30 HNH domain
FRRNSENEDTNFRIKLLLEEFYANEKDIKDVRPYSPSQQELLRIYEEGVWQQEKDIPQDIKDIKKRISNDKDIKDITPNDIQRYRIWMDQKYCSPYTGKTIPLSRLFTTDYEIEHVIPRSRYFDDSYNNKVICEAAVNKDKNNRLGMEYIMAAGGKTIELGNGKNVQILKEEEYVELVDKIFGNNTRKRNIMLTDEITEEFSHRQL

SEQ ID NO: 5320 - protein, 218 aa, unidentified; identical to SEQ ID NO: 5299
  REGION 1..218: note = Description of Unknown: uncultivated organism with predicted taxonomy: Bacteroidales
  REGION 1..218: note = MG22-31 HNH domain

SEQ ID NO: 5321 - protein, 47 aa, unidentified
  REGION 1..47: note = Description of Unknown: uncultivated organism with predicted taxonomy: Bacteroidales
  REGION 1..47: note = MG22-32 HNH domain
DLKNSAAERAKISNRNKQNEGTNFRIKLLLQEFSQYEKDIEGIRRAL

SEQ ID NO: 5322 - protein, 218 aa, unidentified; identical to SEQ ID NO: 5299
  REGION 1..218: note = Description of Unknown: uncultivated organism with predicted taxonomy: Bacteroidales
  REGION 1..218: note = MG22-33 HNH domain

SEQ ID NO: 5323 - protein, 216 aa, unidentified
  REGION 1..216: note = Description of Unknown: uncultivated organism with predicted taxonomy: Bacteroidales
  REGION 1..216: note = MG22-34 HNH domain
DLKNSAAERAKISNRNKQNEGTNFRIKLLLQEFSQYEKDIEGIRPYSPSQQELLRIYEEGVCEQTEMPKDIAKIRRELSSSSEKDVKRSDIQRYRLWLDQKYCSPYTGQPIPLARLFTTDYEIEHVIPRSKYFDDSYNNKVICEAAVNKAKSNRLGMAFIQESGGQIIPLGNGRNVQVLNESAYVEFINKTFKHNARKRSLMLADEITEEFCHRQL

SEQ ID NO: 5324 - protein, 216 aa, unidentified; identical to SEQ ID NO: 5323
  REGION 1..216: note = Description of Unknown: uncultivated organism with predicted taxonomy: Parabacteroides sp. An277
  REGION 1..216: note = MG22-35 HNH domain

SEQ ID NO: 5325 - protein, 217 aa, unidentified
  REGION 1..217: note = Description of Unknown: uncultivated organism with predicted taxonomy: Bacteroidales
  REGION 1..217: note = MG22-36 HNH domain
DLKNSAAERAKISNRNKQNEGTNFRIKLLLQEFSQYEKDIEGIRPYSPSQQELLRIYEKGVCEQTEMPKDIAKIRRELSSSSSEKDVKRSDIQRYRLWLDQKYCSPYTGQPIPLARLFTTDYEIEHVIPRSKYFDDSYNNKVICEAAVNKAKSNRLGMTFIQESGGQIIPLGNGRNVQVLNESAYVEFINKTFKHNARKRSLMLADEITEEFCHRQL

SEQ ID NO: 5326 - protein, 218 aa, unidentified
  REGION 1..218: note = Description of Unknown: uncultivated organism with predicted taxonomy: Bacteroidales
  REGION 1..218: note = MG22-37 HNH domain
DLKNTAEERSRIFRRNSENEDTNFRIKLLLEEFYANEKDIKDVRPYSPSQQELLRIYEEGVWQQEKDIPQDIKDIKKRISNDKDIKDITPNDIQRYRIWMDQKYCSPYTGKTIPLSRLFTTDYEIEHVIPRSRYFDDTYNNKVICESAVNKDKNNRLGMEYIMAAGGKTIELGNGKNVQILKEEEYVELVDKIFGNNTRKRNIMLADEITEDFSHRQL

SEQ ID NO: 5327 - protein, 218 aa, unidentified; identical to SEQ ID NO: 5299
  REGION 1..218: note = Description of Unknown: uncultivated organism with predicted taxonomy: Prevotella
  REGION 1..218: note = MG22-38 HNH domain

SEQ ID NO: 5328 - protein, 218 aa, unidentified
  REGION 1..218: note = Description of Unknown: uncultivated organism with predicted taxonomy: Prevotella sp. MGM2
  REGION 1..218: note = MG22-39 HNH domain
DLKNTAEERSRIFKRNSENEDTNFRIKLLLEEFYANEKDIKDVRPYSPSQQELLRIYEEGVWQQEKDIPQDIKDIKKRISNDKDIKDITPNDIQRYRIWMDQKYCSPYTGKTIPLSRLFTTDYEIEHVIPRSRYFDDSYNNKVICEAAVNKDKNNRLGMEYIMAAGGKTIELGNGKNVQILKEEEYVELVDKIFGNNTRKRNIMLADEITEEFSHRQL

SEQ ID NO: 5329 - protein, 216 aa, unidentified
  REGION 1..216: note = Description of Unknown: uncultivated organism with predicted taxonomy: Bacteroidales
  REGION 1..216: note = MG22-40 HNH domain
DLKNSAAERAKISNRNKQNEGTNFRIKLLLQEFSQYEKDIEGIRPYSPSQQELLRIYEEGVCEQTEMPKDIAKIRRELSSSSEKDVKRSDIQRYRLWLDQKYCSPYTGQPIPLARLFTTDYEIEHVIPRSKYFDDSYNNKVICEAAVNKAKSNRLGMAFIQESGGQIIPLGNGRNVQVLSESAYVEFINKTFKHNARKRSLMLADEITEEFCHRQL

SEQ ID NO: 5330 - protein, 218 aa, unidentified
  REGION 1..218: note = Description of Unknown: uncultivated organism with predicted taxonomy: Bacteroidales
  REGION 1..218: note = MG22-41 HNH domain
DLKNTAEERSRIFRRNSENEDTNFRIKLLLEEFYANEKDIKDVRPYSPSQQELLRIYEEGVWQQEKDIPQDIKDIKKRISNDKDIKDITPNDIQRYRIWMDQKYCSPYTGKTIPLSRLFTTDYEIEHVIPRSRYFDDSYNNKVICEAAVNKDKNNRLGMEYIMAAGGKTIELGNGKNVQILKEEEYVELVDKIFGNNTRKRNIMLADEITEDFSHRQL

SEQ ID NO: 5331 - protein, 218 aa, unidentified; identical to SEQ ID NO: 5313
  REGION 1..218: note = Description of Unknown: uncultivated organism with predicted taxonomy: Prevotella
  REGION 1..218: note = MG22-42 HNH domain

SEQ ID NO: 5332 - protein, 218 aa, unidentified
  REGION 1..218: note = Description of Unknown: uncultivated organism with predicted taxonomy: Bacteroidales
  REGION 1..218: note = MG22-43 HNH domain
DLKNTAEERSRIFRRNSENEDTNFRIKLLLEEFNANEKDIKDVRPYSPSQQELLRIYEEGVWQQEKDIPQDIKDIKKRISNDKDIKDITPNDIQRYRIWMDQKYCSPYTGKTIPLSRLFTTDYEIEHVIPRSRYFDDSYNNKVICEAAVNKDKNNRLGMEYIMAAGGKTIELGNGKDVQILKEEEYVELVDKIFGNNTRKRNIMLADEITEEFSHRQL

SEQ ID NO: 5333 - protein, 218 aa, unidentified; identical to SEQ ID NO: 5299
  REGION 1..218: note = Description of Unknown: uncultivated organism with predicted taxonomy: Bacteroidales
  REGION 1..218: note = MG22-44 HNH domain

SEQ ID NO: 5334 - protein, 218 aa, unidentified
  REGION 1..218: note = Description of Unknown: uncultivated organism with predicted taxonomy: Bacteroidales
  REGION 1..218: note = MG22-45 HNH domain
DLKNTAEERSRIFRRNSENEDTNFRIKLLLEEFNANEKDIKDVRPYSPSQQELLHIYEEGVWQQEKDIPQDIKDIKKRISNDKDIKGITPNDIQRYRIWMDQKYCSPYTGKTIPLSRLFTTDYEIEHVIPRSRYFDDSYNNKVICEAAVNKDKNNRLGMEYIMAAGGKTIKLGNGKNVQILKEEEYVELVDKIFGNNTRKRNIMLADEITEEFSHRQL

SEQ ID NO: 5335 - protein, 216 aa, unidentified; identical to SEQ ID NO: 5323
  REGION 1..216: note = Description of Unknown: uncultivated organism with predicted taxonomy: Bacteroidales
  REGION 1..216: note = MG22-46 HNH domain

SEQ ID NO: 5336 - protein, 218 aa, unidentified
  REGION 1..218: note = Description of Unknown: uncultivated organism with predicted taxonomy: Bacteroidales
  REGION 1..218: note = MG22-47 HNH domain
DLKNTAEERSRIFRRNSENEDTNFRIKLLLEEFYANEKDIKDVRPYSPSQQELLRIYEEGVWQQEKDIPQDIKDIKKRISNDKDIKDITPNDIQRYRIWMDQKYCSPYTGKTIPLSRLFTTDYEIEHVIPRSRYFDDSYNNKVICEATVNKDKNNRLGMEYIMAAGGKTIELGNGKNVQILKEEEYVELVDKIFGNNTRKRNIMLADEITEEFSHRQL

SEQ ID NO: 5337 - protein, 216 aa, unidentified; identical to SEQ ID NO: 5323
  REGION 1..216: note = Description of Unknown: uncultivated organism with predicted taxonomy: Bacteroidales
  REGION 1..216: note = MG22-48 HNH domain

SEQ ID NO: 5338 - protein, 218 aa, unidentified; identical to SEQ ID NO: 5299
  REGION 1..218: note = Description of Unknown: uncultivated organism with predicted taxonomy: Bacteroidales
  REGION 1..218: note = MG22-49 HNH domain

SEQ ID NO: 5339 - protein, 218 aa, unidentified
  REGION 1..218: note = Description of Unknown: uncultivated organism with predicted taxonomy: Bacteroidales
  REGION 1..218: note = MG22-50 HNH domain
DLKNTAEERSRIFRRNSENEDTNFRIKLLLEEFYANEKDIKDVRPYSPSQQELLRIYEEGVWQKEKDIPQDIKDIKKRISNDKDIKDITPNDIQRYRIWMDQKYCSPYTGKTIPLSRLFTTDYEIEHVIPRSRYFDDSYNNKVICEAAVNKDKNNRLGMEYIMAAGGKTIELGNGKNVQILKEEEYVELVDKIFGNNTRKRNIMLADEITEEFSHRQL

SEQ ID NO: 5340 - protein, 217 aa, unidentified
  REGION 1..217: note = Description of Unknown: uncultivated organism with predicted taxonomy: Prevotellaceae
  REGION 1..217: note = MG22-51 HNH domain
DLKNSAAERAKISNRNKQNEGTNFRIKLLLQEFSQYEKDIEGIRPYSPSQQELLRIYEEGVCEQTEMPKDIAKIRRELSSSSSEKDVKRSDIQRYRLWLDQKYCSPYTGQPIPLARLFTTDYEIEHVIPRSKYFDDSYNNKVICEAAVNKAKSNRLGMAFIQESGGQIIPLGNGRNVQVLNESAYVEFINKTFKHNARKRSLMLADEITEEFCNRQL

SEQ ID NO: 5341 - protein, 168 aa, unidentified
  REGION 1..168: note = Description of Unknown: uncultivated organism with predicted taxonomy: Prevotella sp. MGM2
  REGION 1..168: note = MG22-52 HNH domain
DLKNTAEERSRIFRRNSENEDTNFRIKLLLEEFYANEKDIKDVRPYSPSQQELLRIYEEGVWQQEKDIPQDIKDIKKRISNDKDIKDITPNDIQRYRIWMDQKYCSPYTGKTIPLSRLFTTDYEIEHVIPRSRYFDDSYNNKVICEAAVNKDKNNRLYNPQNEAFRLS

SEQ ID NO: 5342 - protein, 218 aa, unidentified
  REGION 1..218: note = Description of Unknown: uncultivated organism with predicted taxonomy: Bacteroidales
  REGION 1..218: note = MG22-53 HNH domain
DLKNTAEERSRIFRRNSENEDTNFRIKLLLEEFYANEKDIKDVRPYSPSQQELLRIYEEGVWQQEKDIPQDIKDIKKRISNDKDIKDITPNDIQRYRIWMDQKYCSPYTGKTIPLSRLFTTDYEIEHVIPRSRYFDDSYNNKVICEATVNKDKNNRLGMEYIMAAGGKTIELGNGKNVQILKEEEYVELVDKIFGNNTRKRNIMLTDEITEEFSHRQL

SEQ ID NO: 5343 - protein, 218 aa, unidentified
  REGION 1..218: note = Description of Unknown: uncultivated organism with predicted taxonomy: Bacteroidales
  REGION 1..218: note = MG22-54 HNH domain
DLKNTAEERSRIFRRNSENEDTNFRIKLLLEEFNANEKDIKDVRPYSPSQQELLRIYEEGVWQQEKDIPQDIKDIKKRISNDKDIKGITPNDIQRYRIWMDQKYCSPYTGKTIPLSRLFTTDYEIEHVIPRSRYFDDSYNNKVICEAAVNKDKNNRLGMEYIMAAGGKTIKLGNGKNVQILKEEEYVELVDKIFGNNTRKRNIMLADEITEEFSHRQL

SEQ ID NO: 5344 - protein, 218 aa, unidentified; identical to SEQ ID NO: 5343
  REGION 1..218: note = Description of Unknown: uncultivated organism with predicted taxonomy: Bacteroidales
  REGION 1..218: note = MG22-55 HNH domain

SEQ ID NO: 5345 - protein, 218 aa, unidentified
  REGION 1..218: note = Description of Unknown: uncultivated organism with predicted taxonomy: Bacteroidales
  REGION 1..218: note = MG22-56 HNH domain
DLKNTAEERSRIFKRNSENEDTNFRIKLLLEEFYANEKDIKDVRPYSPSQQELLRIYEEGVWQQEKDIPQDIKDIKKRISNDKDIKDITPNDIQRYRIWMDQKYCSPYTGKTIPLSRLFTTDYEIEHVIPRSRYFDDSYNNKVICEAAVNKDKNNRLGMEYIMAAGGKTIELGNGKNVQILKKEEYVELVDKIFGNNTRKRNIMLADEITEDFSHRQL

SEQ ID NO: 5346 - protein, 218 aa, unidentified
  REGION 1..218: note = Description of Unknown: uncultivated organism with predicted taxonomy: Bacteroidales
  REGION 1..218: note = MG22-57 HNH domain
DLKNTAEERSRIFRRNSENEDTNFRIKLLLEEFNANEKDIKDVRPYSPSRQELLRIYEEGVWQQEKDIPQDIKDIKKRISNDKDIKDITPNDIQRYRIWMDQKYCSPYTGKTIPLSRLFTTDYEIEHVIPRSRYFDDSYNNKVICEAAVNKDKNNRLGMEYIMAAGGKTIELGNGKNVQILKEEEYVELVDKIFGNNTRKRNIMLADEITEEFSHRQL

SEQ ID NO: 5347 - protein, 218 aa, unidentified; identical to SEQ ID NO: 5299
  REGION 1..218: note = Description of Unknown: uncultivated organism with predicted taxonomy: Bacteroidales
  REGION 1..218: note = MG22-58 HNH domain

SEQ ID NO: 5348 - protein, 218 aa, unidentified; identical to SEQ ID NO: 5302
  REGION 1..218: note = Description of Unknown: uncultivated organism with predicted taxonomy: Bacteroidales
  REGION 1..218: note = MG22-59 HNH domain

SEQ ID NO: 5349 - protein, 218 aa, unidentified; identical to SEQ ID NO: 5299
  REGION 1..218: note = Description of Unknown: uncultivated organism with predicted taxonomy: Bacteroidales
  REGION 1..218: note = MG22-60 HNH domain

SEQ ID NO: 5350 - protein, 218 aa, unidentified
  REGION 1..218: note = Description of Unknown: uncultivated organism with predicted taxonomy: Bacteroidales
  REGION 1..218: note = MG22-61 HNH domain
DLKNTAEERSRIFRRNSENEDTNFRIKLLLEEFNANEKDIKDVRPYSPSQQELLRIYEEGVWQQEKDIPQDIKDIKKRISNDKDIKDITPNDIQRYRIWMDQKYCSPYTGKTIPLSRLFTTDYEIEHVIPRSRYFDDSYNNKVICEAAVNKDKNNRLGMEYIMAAGGKTIELGNGKNVQILMEEEYVELVDKIFGNNTRKRNIMLADEITEEFSHRQL

SEQ ID NO: 5351 - protein, 218 aa, unidentified; identical to SEQ ID NO: 5299
  REGION 1..218: note = Description of Unknown: uncultivated organism with predicted taxonomy: Bacteroidales
  REGION 1..218: note = MG22-62 HNH domain

SEQ ID NO: 5352 - protein, 155 aa, unidentified
  REGION 1..155: note = Description of Unknown: uncultivated organism with predicted taxonomy: Parabacteroides
  REGION 1..155: note = MG22-63 HNH domain
DLKNTAEERSRIFRRNSENEDTNFRIKLLLEEFYANEKDIKDVRPYSPSQQELLRIYEEGVWQQEKDIPQDIKDIKKRISNDKDIKDITPNDIQRYRIWMDQKYCSPYTGKTIPLSRLFTTDYEIEHVIPRSRYFDDSYNNKVICEAAVNKDKNN

SEQ ID NO: 5353 - protein, 218 aa, unidentified
  REGION 1..218: note = Description of Unknown: uncultivated organism with predicted taxonomy: Prevotella sp. MGM2
  REGION 1..218: note = MG22-64 HNH domain
DLKNTAEERSRIFRRNSENEDTNFRIKLLLEEFNANEKDIKDVRPYSPSQQELLRIYEEGVWQQEKDIPQDIKDIKKRISNDKDIKDITPNDIQRYRIWMDQKYCSPYTGKTIPLSRLFTTDYEIEHVIPRSRYFDDSYNNKVICEAAVNKDKNNRLGMEYIMAAGGKTIELGNGKNVQILKEEEYVELVDKIFGNNTRKRNIMLADEITEEFSHRQL

SEQ ID NO: 5354 - protein, 218 aa, unidentified; identical to SEQ ID NO: 5353
  REGION 1..218: note = Description of Unknown: uncultivated organism with predicted taxonomy: Prevotella
  REGION 1..218: note = MG22-65 HNH domain

SEQ ID NO: 5355 - protein, 218 aa, unidentified; identical to SEQ ID NO: 5299
  REGION 1..218: note = Description of Unknown: uncultivated organism with predicted taxonomy: Prevotella sp. MGM2
  REGION 1..218: note = MG22-66 HNH domain

SEQ ID NO: 5356 - protein, 180 aa, unidentified
  REGION 1..180: note = Description of Unknown: uncultivated organism with predicted taxonomy: Bacteroidales
  REGION 1..180: note = MG22-67 HNH domain
DLKNTAEERSRIFRRNSENEDTNFRIKLLLEEFNANEKDIKDVRPYSPSQQELLRIYEEGVWQQEKDIPQDIKDIKKRISNDKDIKDITPNDIQRYRIWMDQKYCSPYTAKRYHCPVFSPPTTKSNTSFRVHGILTTPIIIRSSAKLPSTKTKTTDWAWNTSWLLEEKRLNSATGKTFKF

SEQ ID NO: 5357 - protein, 218 aa, unidentified; identical to SEQ ID NO: 5299
  REGION 1..218: note = Description of Unknown: uncultivated organism with predicted taxonomy: Bacteroidales
  REGION 1..218: note = MG22-68 HNH domain

SEQ ID NO: 5358 - protein, 218 aa, unidentified; identical to SEQ ID NO: 5353
  REGION 1..218: note = Description of Unknown: uncultivated organism with predicted taxonomy: Bacteroidales
  REGION 1..218: note = MG22-69 HNH domain

SEQ ID NO: 5359 - protein, 218 aa, unidentified; identical to SEQ ID NO: 5299
  REGION 1..218: note = Description of Unknown: uncultivated organism with predicted taxonomy: Bacteroidales
  REGION 1..218: note = MG22-70 HNH domain

SEQ ID NO: 5360 - protein, 217 aa, unidentified; identical to SEQ ID NO: 5340
  REGION 1..217: note = Description of Unknown: uncultivated organism with predicted taxonomy: Bacteroidales
  REGION 1..217: note = MG22-71 HNH domain

SEQ ID NO: 5361 - protein, 218 aa, unidentified
  REGION 1..218: note = Description of Unknown: uncultivated organism with predicted taxonomy: Bacteroidales
  REGION 1..218: note = MG22-72 HNH domain
DLKNTAEERSRIFRRNSENEDTNFRIKLLLEKFNANEKDIKDVRPYSPSQQELLRIYEEGVWQQEKDIPQDIKDIKKRISNDKDIKDITPNDIQRYRIWMDQKYCSPYTGKTIPLSRLFTTDYEIEHVIPRSRYFDDSYNNKVICEAAVNKDKNNRLGMEYIMAAGGKTIELGNGKNVQILKEEEYVELVDKIFGNNTRKRNIMLADEITEEFSHRQL

SEQ ID NO: 5362 - protein, 218 aa, unidentified; identical to SEQ ID NO: 5305
  REGION 1..218: note = Description of Unknown: uncultivated organism with predicted taxonomy: Prevotella sp. MGM2
  REGION 1..218: note = MG22-73 HNH domain

SEQ ID NO: 5363 - protein, 218 aa, unidentified; identical to SEQ ID NO: 5305
  REGION 1..218: note = Description of Unknown: uncultivated organism with predicted taxonomy: Bacteroidales
  REGION 1..218: note = MG22-74 HNH domain

SEQ ID NO: 5364 - protein, 218 aa, unidentified
  REGION 1..218: note = Description of Unknown: uncultivated organism with predicted taxonomy: Bacteroidales
  REGION 1..218: note = MG22-75 HNH domain
DLKNTAEERARISKRNSENEDTNFRIKLLLKEFYTNEEDMEGIRPYSPSQQELLRIYEEGVWQQEKEIPQDIKDIKKKLSSDKDINEITHSDVQRYRIWMDQEYCSPYTGNPIPLSRLFTPDYEIEHVIPRSRYFDDSYNNKVICEAAVNKDKNNRLGMEYIMEAGGKTIELGNGKNVQVLKEREYVELVNEVFKNNTRKRNILLADEIPEDFSHRQL

SEQ ID NO: 5365 - protein, 218 aa, unidentified
  REGION 1..218: note = Description of Unknown: uncultivated organism with predicted taxonomy: Bacteroidales
  REGION 1..218: note = MG22-76 HNH domain
DLKNTAEERSRIFRRNSENEDTNFRIKLLLEEFYANEKDIKDVRPYSPSQQELLRIYEEGVWQQEKDIPQDIKDIKKRISNDKDIKDITPNDIQRYRIWMDQKYCSPYTGKTIPLSRLFTTDYEIEHVIPRSRYFDDSYNNKVICEAAVNKDKNNRLGMEYIMAAGGKTIELGNGKNVQILKEEEYVELVDKIFGSNTRKRNIMLADEITEDFSHRQL

SEQ ID NO: 5366 - protein, 218 aa, unidentified; identical to SEQ ID NO: 5299
  REGION 1..218: note = Description of Unknown: uncultivated organism with predicted taxonomy: Prevotella
  REGION 1..218: note = MG22-77 HNH domain

SEQ ID NO: 5367 - protein, 218 aa, unidentified; identical to SEQ ID NO: 5302
  REGION 1..218: note = Description of Unknown: uncultivated organism with predicted taxonomy: Bacteroidales
  REGION 1..218: note = MG22-78 HNH domain

SEQ ID NO: 5368 - protein, 218 aa, unidentified
  REGION 1..218: note = Description of Unknown: uncultivated organism with predicted taxonomy: Bacteroidales
  REGION 1..218: note = MG22-79 HNH domain
DLKNTAEERSRIFRRNSENEDTNFRIKLLLEEFYANEKDIKDVRPYSPSQQELLRIYEEGVWQQEKDIPQDIKDIRKRISNDKDIKDITPNDIQRYRIWMDQKYCSPYTGKTIPLSRLFTTDYEIEHVIPRSRYFDDSYNNKVICEAAVNKDKNNRLGMEYIIAAGGKTIELGNGKNVQILKEEEYVELVDKIFGNNTRKRNIMLADEITEEFSHRQL

SEQ ID NO: 5369 - protein, 218 aa, unidentified; identical to SEQ ID NO: 5299
  REGION 1..218: note = Description of Unknown: uncultivated organism with predicted taxonomy: Bacteroidales
  REGION 1..218: note = MG22-80 HNH domain

SEQ ID NO: 5370 - protein, 217 aa, unidentified; identical to SEQ ID NO: 5340
  REGION 1..217: note = Description of Unknown: uncultivated organism with predicted taxonomy: Bacteroidales
  REGION 1..217: note = MG22-81 HNH domain

SEQ ID NO: 5371 - protein, 218 aa, unidentified; identical to SEQ ID NO: 5353
  REGION 1..218: note = Description of Unknown: uncultivated organism with predicted taxonomy: Prevotella
  REGION 1..218: note = MG22-82 HNH domain

SEQ ID NO: 5372 - protein, 218 aa, unidentified; identical to SEQ ID NO: 5353
  REGION 1..218: note = Description of Unknown: uncultivated organism with predicted taxonomy: Prevotella
  REGION 1..218: note = MG22-83 HNH domain

SEQ ID NO: 5373 - protein, 218 aa, unidentified; identical to SEQ ID NO: 5330
  REGION 1..218: note = Description of Unknown: uncultivated organism with predicted taxonomy: Bacteroidales
  REGION 1..218: note = MG22-84 HNH domain

SEQ ID NO: 5374 - protein, 218 aa, unidentified; identical to SEQ ID NO: 5299
  REGION 1..218: note = Description of Unknown: uncultivated organism with predicted taxonomy: Prevotella
  REGION 1..218: note = MG22-85 HNH domain

SEQ ID NO: 5375 - protein, 218 aa, unidentified
  REGION 1..218: note = Description of Unknown: uncultivated organism with predicted taxonomy: Bacteroidales
  REGION 1..218: note = MG22-86 HNH domain
DLKNTAEERSRIFRRNSENEETNFRIKLLLEEFYANEKDIKDVRPYSPSQQELLRIYEEGVWQQEKDIPQDIKDIKKRISNDKDIKDITPNDIQRYRIWMDQKYCSPYTGKTIPLSRLFTTDYEIEHVIPRSRYFDDSYNNKVICEAAINKDKNNRLGMEYIMAAGGKTIELGNGKDVQILKEEEYVELVDKIFGNNTRKRNIMLADEITEEFSHRQL

SEQ ID NO: 5376 - protein, 218 aa, unidentified
  REGION 1..218: note = Description of Unknown: uncultivated organism with predicted taxonomy: Prevotella sp. MGM2
  REGION 1..218: note = MG22-87 HNH domain
DLKNTAEERSRIFRRNSENEDTNFRIKLLLEEFYANEKDIKDVRPYSPSQQELLRIYEEGVWQQEKDIPQDIKDIKKRISNDKDIKDITPNDIQRYRIWMDQKYCSPYTGKTIPLSRLFTTDYEIEHVIPRSRYFDDSYNNKVICEAAVNKDKNNRLGMEYIMAAGGKTIELGNGKNVQILKEEEYVELVDKIFGNNTRKRNIMLADEITEEFSQRQL

SEQ ID NO: 5377 - protein, 218 aa, unidentified
  REGION 1..218: note = Description of Unknown: uncultivated organism with predicted taxonomy: Prevotella sp. MGM2
  REGION 1..218: note = MG22-88 HNH domain
DLKNTAEERSRIFRRNSENEDTNFRIKLLLEEFYANEKDIKDVRPYSPSQQELLRIYEEGVWQQEKDIPQDIKDIKKRISNDKDIKDITPNDIQRYRIWMDQKYCSPYTGKTIPLSRLFTTDYEIEHVIPRSRYFDDSYNNKVICEAAVNKDKNNRLGMEYIMAAGGKTIELGNGKNVQILKEEEYVELVDKIFGNNTRKRNIMLTDEITEEFSHRQL

SEQ ID NO: 5378 - protein, 218 aa, unidentified
  REGION 1..218: note = Description of Unknown: uncultivated organism with predicted taxonomy: Prevotella sp. MGM2
  REGION 1..218: note = MG22-89 HNH domain
DLKNTAEERSRIFRRNSENEDTIFRIKLLLEEFYANEKDIKDVRPYSPSQQELLRIYEEGVWQQEKDIPQDIKDIKKRISNDKDIKDITPNDIQRYRIWMDQKYCSPYTGKTIPLSRLFTTDYEIEHVIPRSRYFDDSYNNKVICEAAVNKDKNNRLGMEYIMAAGGKTIELGNGKNVQILKEEEYVELVDKIFGNNTRKRNIMLADEITEEFSHRQL

SEQ ID NO: 5379 - protein, 218 aa, unidentified; identical to SEQ ID NO: 5304
  REGION 1..218: note = Description of Unknown: uncultivated organism with predicted taxonomy: Bacteroidales
  REGION 1..218: note = MG22-90 HNH domain

SEQ ID NO: 5380 - protein, 218 aa, unidentified; identical to SEQ ID NO: 5377
  REGION 1..218: note = Description of Unknown: uncultivated organism with predicted taxonomy: Prevotella
  REGION 1..218: note = MG22-91 HNH domain

SEQ ID NO: 5381 - protein, 218 aa, unidentified; identical to SEQ ID NO: 5302
  REGION 1..218: note = Description of Unknown: uncultivated organism with predicted taxonomy: Bacteroidales
  REGION 1..218: note = MG22-92 HNH domain

SEQ ID NO: 5382 - protein, 217 aa, unidentified
  REGION 1..217: note = Description of Unknown: uncultivated organism with predicted taxonomy: Prevotella
  REGION 1..217: note = MG22-94 HNH domain
NMRATAKERQKTSQLQLENEQANLRIKALLQEFMNPEFEVEDVRPYSPSQQELLRIYEGTVLEQEAGHIDEPIREIIRKFSQTDAAKRPTTSEVLRYKLWLEQKYRSPYTGEVIPLGKLFTPAYQIEHVIPQSLYYDNSFNNKVICEAEVNLLKGNQLGMPFIMRHANEKVVCSMGKQVKIFTPEAYRLFVEEHYRGRKMTILLSEEIPTAFNDRQK

SEQ ID NO: 5383 - protein, 227 aa, unidentified
  REGION 1..227: note = Description of Unknown: uncultivated organism with predicted taxonomy: Bacteroidales
  REGION 1..227: note = MG22-95 HNH domain
SVKQNKEQRERAMTQMAENERRNLRLRAMLEAFLNDRDPIGFDPDANINPGSPNQQLKLRLFEDTAFSYAQANGDDQVEEMLNIRNSITGGSDEKSATPAQIRRYALWLEQNFRSPYTGATISLARLFTDDYQVDHIIPQALYWDDSFNNKVLCEGGVNNTKSNALAFDFIAAHQGETIALPNGRKVTILSMEQYQELVLATYKNNRAKCEKLLMKEIPAEFTQRQL

SEQ ID NO: 5384 - protein, 219 aa, unidentified
  REGION 1..219: note = Description of Unknown: uncultivated organism with predicted taxonomy: Bacteroidales
  REGION 1..219: note = MG22-96 HNH domain
NLNQTAEQRKRDTERNLGNERANLRAKILLTEFLNPEMNVENVRPYSPSQLELLRIFEEGILDDSAGNMPDDIQEIIKKLDSTDIKRRPTESEVLRYRNWLEQGYRSPYTNEIIPLSKLFTTAYQIEHIIPQSLYFNNSYNNKVICEAEVNQLKSNQLGMEFVKNHGGEIVECAFGRKVRILTPEEYTAFVEQHYKHNVHKKNNLLSTELPSEFSSRQL

SEQ ID NO: 5385 - protein, 219 aa, unidentified
  REGION 1..219: note = Description of Unknown: uncultivated organism with predicted taxonomy: Bacteroidetes
  REGION 1..219: note = MG22-97 HNH domain
NLNQTAEQRKRDTERNLGNERANLRAKILLTEFLNPEMNVENVRPYSPSQQELLRIFEEGIIDDSTGNMPDDIQEIIKKLDSSDIKRRPTESEILRYRNWLEQGYRSPYTNEIIPLSKLFTPAYQIEHIIPQSLYFNNSYNNKVICETEVNQLKSNQLGMEFVKNHGGEIVECAFGRKVRILTPEEYTAFVEQHYKHNIHKKNNLLSTELPSEFSSRQL

SEQ ID NO: 5386 - protein, 176 aa, unidentified
  REGION 1..176: note = Description of Unknown: uncultivated organism with predicted taxonomy: Bacteroidales
  REGION 1..176: note = MG22-98 HNH domain
SMKQTSQQRKADNERMQSNYKRNQEVRDKIAEELQQNATNGERPKIGAKKIASYKIWEDQKGRSPYTGKAISDAALLNADGRYDIDHVIPQSRYYDDSLNNKVICEKEVNLKKGNMLGLEFIQKHGGETIQLSSGGEVTILREEEDKKLVNETFKGRKQKIMLMTETPNDFTNRQK

SEQ ID NO: 5387 - protein, 220 aa, unidentified
  REGION 1..220: note = Description of Unknown: uncultivated organism with predicted taxonomy: Flavobacteriales
  REGION 1..220: note = MG22-99 HNH domain
DMRKTAQERKRDSERNSQNFKARQRIKMLLDEFEKMRIDDVHPYSPMHQEKLRIVEDGVFDRVSAKGDEKSKEMLKDMRAFQTNVEKNNVTPGDISRYMLYLEQNYRSPYTNETISMKRLFSSDYEIEHVIPRSRFFDDSMSNKVICEAKVNKEKGNMTGMEFIMKRGGEKIELGEGREVTIVNEKDYRQYVDEVYKNNSRKRKNLLSEDIPGGFSNSQM

SEQ ID NO: 5388 - protein, 217 aa, unidentified
  REGION 1..217: note = Description of Unknown: uncultivated organism with predicted taxonomy: Bacteroidales
  REGION 1..217: note = MG22-100 HNH domain
EMRATAKEREERSARQLRNEQTNLRIKALLQEFMNPALEIEDVRPYSPSQQELLHIYEETVLEQEAGNIDDDIREIIRKFTQTEASKRPTEGEVRRYKLWLEQRYRSPYTGKNIPLGKLFTPAYQIEHVIPQSVYYDNSYNNKVICEAEVNLLKGNMLGMAFIKEHAGEIVPLSLGGEVEILKPDTYREFVEEHYKGRKRQIMLSEEIPTEFTSRQM

SEQ ID NO: 5389 - protein, 217 aa, unidentified
  REGION 1..217: note = Description of Unknown: uncultivated organism with predicted taxonomy: Bacteroidales
  REGION 1..217: note = MG22-101 HNH domain
EMRATAKERESRHNRQLENEQTNLRIKALLQEFMNPEFGIEDVRPYSPNQQELLRIYEDTVLSQEAGRVDEPIREIIRKFSQTDAAKRPTTAEVLRYKLWLEQKYRSPYTGEPISLSKIFTSAYQIEHVIPQSVYYDNSYSNKVICEAEVNLLKGNMLGMPFIMQHAGEKVQCSVGNIVTISTPEAYRAFVEEHYKGKKQKILLSEEIPTNFTARQM

SEQ ID NO: 5390 - protein, 164 aa, unidentified
  REGION 1..164: note = Description of Unknown: uncultivated organism with predicted taxonomy: Clostridia
  REGION 1..164: note = MG23-1 HNH domain
EDGEKGARTVSRKKKLLDLYDAIKHEERELAKVFSDEIDSKTEADFRSKKLYLYYLQQGRCMYSGDIIHLSDLMNDNLYDIDHIYPRHFIKDDSLENNLVLVKKQINNRKQDTFPIERSIQEDMRPFWKSLADSGFISAEKYKRLTRRDAFTDEEKAAFISRQL

SEQ ID NO: 5391 - protein, 162 aa, unidentified
  REGION 1..162: note = Description of Unknown: uncultivated organism with predicted taxonomy: Firmicutes
  REGION 1..162: note = MG23-3 HNH domain
DDAQTKAKNKGKRTKSRKDFLLECYKDDKAWKDELTSVDDGELRAKKLYLYYLQMGRCMYSGEAIDLASLMSGNTMYDIDHIHPRHFVKDDSLENNLVLVKKDKNAHKSDNYPLESEIRNKQFGFWKSLLDKGLITKTKFTRLIRSEDFSPEELAGFINRQL

SEQ ID NO: 5392 - protein, 160 aa, unidentified
  REGION 1..160: note = Description of Unknown: uncultivated organism with predicted taxonomy: Clostridiales
  REGION 1..160: note = MG23-4 HNH domain
EDGEKGERKDSRKKKLLDLYSALKGEEKAWRKEIEDRPEADFRIKKLYLYYRQMGKCMYTGETIELADLFNDNLYDIDHIYPRHFVKDDSIENNLILVKKQKNARKGDSYPIEREIQRARYQLWKMLADKNFISREKHQRLIRTTPFSEEEKAGFISRQL

SEQ ID NO: 5393 - protein, 166 aa, unidentified
  REGION 1..166: note = Description of Unknown: uncultivated organism with predicted taxonomy: Firmicutes
  REGION 1..166: note = MG23-5 HNH domain
DSAQTRARNKGKRTQSRKEFLLNVYKEDKEWRKEIQSCEEIKFRKKKIYLYYLQHGKSLYSGKTIDFDTLLSDNDAYDIDHIYPRHFVKDDSLENNLVLCLKSENAKKGDQYPLRKTFDSAVLSSQEGVWKSLLKQKVITKEKYDRLVRTADFTIDELAGFINRQL

SEQ ID NO: 5394 - protein, 162 aa, unidentified
  REGION 1..162: note = Description of Unknown: uncultivated organism with predicted taxonomy: Clostridiales
  REGION 1..162: note = MG23-6 HNH domain
DSAQTRARNKGKRTQSRKDFLINAYKEDKEWRKEIESRDEAEFRIKKLYLYYVQMGRCMYSGEAIDLHALMAGNEQYDIDHIYPRHFVKDDSLENNLVLVKKTINAHKSDTFPLEAELRKKQYAFWRSLLDRGLITQNKFNRLTRATGFSNEELAGFINRQL

SEQ ID NO: 5395 - protein, 160 aa, unidentified; identical to SEQ ID NO: 5392
  REGION 1..160: note = Description of Unknown: uncultivated organism with predicted taxonomy: Clostridiales
  REGION 1..160: note = MG23-7 HNH domain

SEQ ID NO: 5396 - protein, 160 aa, unidentified; identical to SEQ ID NO: 5392
  REGION 1..160: note = Description of Unknown: uncultivated organism with predicted taxonomy: Clostridiales
  REGION 1..160: note = MG23-8 HNH domain

SEQ ID NO: 5397 - protein, 160 aa, unidentified; identical to SEQ ID NO: 5392
  REGION 1..160: note = Description of Unknown: uncultivated organism with predicted taxonomy: Clostridiales
  REGION 1..160: note = MG23-9 HNH domain

SEQ ID NO: 5398 - protein, 165 aa, unidentified
  REGION 1..165: note = Description of Unknown: uncultivated organism with predicted taxonomy: Clostridiales
  REGION 1..165: note = MG23-10 HNH domain
EHESGNERKASRKKKMLDLYKAIKSEQKQWAEHMIAEIDKSDEADFRIKKLYLYYIQQGKCMYSGDTIDLDLLLKNNNIYDIDHIYPRHFIKDDSIDNNLVLVKKEINNHKSDKYPLESDIREDMSGFWKYLCEKKFITKEKYNRLMRTEKFSAEEKAAFVNRQL

SEQ ID NO: 5399 - protein, 164 aa, unidentified
  REGION 1..164: note = Description of Unknown: uncultivated organism with predicted taxonomy: Butyrivibrio sp. CAG:318
  REGION 1..164: note = MG23-11 HNH domain
EHGKENDRKASRKKKLLDLYSTLKREDKTWAELKIREIEGRTEADFRIKKLYLYYMQQGKCMYSGEKIELNDLFNNNLYDIDHIYPRHFIKDDSLENNLVLVKKEINNHKSDNYPLESDIRKNMNKFWKSLRDKNFISKEKYSRLIRTEEFTDEEKAAFISRQL

SEQ ID NO: 5400 - protein, 164 aa, unidentified
  REGION 1..164: note = Description of Unknown: uncultivated organism with predicted taxonomy: Butyrivibrio sp. CAG:318
  REGION 1..164: note = MG23-12 HNH domain
EHGKENDRKASRKKKLLDLYSALKRENKTWAELKIREIEGKTEADFRIKKLYLYYMQQGKCMYSGEKIELNDLFNNNLYDIDHIYPRHFIKDDSLENNLVLVKKQINNHKSDNYPLENNIRKNMNEFWKTLREKNFISKEKYSRLIRTEEFTDEEKAAFISRQL

SEQ ID NO: 5401 - protein, 165 aa, unidentified
  REGION 1..165: note = Description of Unknown: uncultivated organism with predicted taxonomy: Clostridium sp. AF36-4
  REGION 1..165: note = MG23-13 HNH domain
EHESGNERKASRKKKMLDLYKAIKSEQKQWAEQMIAEIDKRDEADFRIKKLYLYYIQQGKCMYSGDTIDLDLLLKNNNIYDIDHIYPRHFIKDDSIDNNLVLVKKEINNHKSDKYPLESDIREDMSGFWKYLCEKKFITKEKYNRLMRTEKFSAEEKAAFVNRQL

SEQ ID NO: 5402 - protein, 164 aa, unidentified
  REGION 1..164: note = Description of Unknown: uncultivated organism with predicted taxonomy: Butyrivibrio sp. CAG:318
  REGION 1..164: note = MG23-14 HNH domain
EHGKENDRKTSRKKKILDLYSALKREKKEWAELKIREIEGRTEADFRIKKLYLYYLQQGRCMYSGEKIELNDLFNNNLYDIDHIYPRHFIKDDSLENNLVLVKKEINNHKSDNYPLESDIRKNMNEFWKSLREKNFISKEKYSRLIRTEEFTDEEKAAFISRQL

SEQ ID NO: 5403 - protein, 164 aa, unidentified
  REGION 1..164: note = Description of Unknown: uncultivated organism with predicted taxonomy: Butyrivibrio sp. CAG:318
  REGION 1..164: note = MG23-15 HNH domain
EHGKENDRKASRKKKLLDLYSALKRENKTWAELKIREIEGKTEADFRIKKLYLYYMQQGKCMYSGEKIELNDLFNNNLYDIDHIYPRHFIKDDSLENNLVLVKKEINNHKSDNYPLESDIRKNMNKFWKSLREQNFISEEKYSRLIRTEEFTDEEKAAFISRQL

SEQ ID NO: 5404 - protein, 165 aa, unidentified; identical to SEQ ID NO: 5401
  REGION 1..165: note = Description of Unknown: uncultivated organism with predicted taxonomy: Clostridium sp. AF36-4
  REGION 1..165: note = MG23-16 HNH domain

SEQ ID NO: 5405 - protein, 164 aa, unidentified
  REGION 1..164: note = Description of Unknown: uncultivated organism with predicted taxonomy: Butyrivibrio sp. CAG:318
  REGION 1..164: note = MG23-17 HNH domain
EHGKENDRKASRKKKLLDLYSALKRENKTWAELKIREIEGKTEADFRIKKLYLYYMQQGKCMYSGEKIELNDLFNNNLYDIDHIYPRHFIKDDSLENNLVLVKKQINNHKSDNYPLESNIRKNMNEFWKTLREKNFISKEKYSRLIRTEEFTDEEKAAFISRQL

SEQ ID NO: 5406 - protein, 165 aa, unidentified
  REGION 1..165: note = Description of Unknown: uncultivated organism with predicted taxonomy: Clostridiales
  REGION 1..165: note = MG23-18 HNH domain
EHESGNERKASRKKKLLDLYKAVKSEQKQWAEHKITEIDKRDEADFRIKKLYLYYIQHGKCMYSGDTIDLDLLLKNNNIYDIDHIYPRHFIKDDSIDNNLVLVKKEINNHKSDKYPLESDIREDMSGFWKYLCEKKFITKEKYNRLMRTEKFSAEEKAAFVNRQL

SEQ ID NO: 5407 - protein, 164 aa, unidentified; identical to SEQ ID NO: 5402
  REGION 1..164: note = Description of Unknown: uncultivated organism with predicted taxonomy: Butyrivibrio sp. CAG:318
  REGION 1..164: note = MG23-19 HNH domain

SEQ ID NO: 5408 - protein, 164 aa, unidentified; identical to SEQ ID NO: 5399
  REGION 1..164: note = Description of Unknown: uncultivated organism with predicted taxonomy: Butyrivibrio sp. CAG:318
  REGION 1..164: note = MG23-20 HNH domain

SEQ ID NO: 5409 - protein, 164 aa, unidentified
  REGION 1..164: note = Description of Unknown: uncultivated organism with predicted taxonomy: Butyrivibrio sp. CAG:318
  REGION 1..164: note = MG23-21 HNH domain
EHGKENDRKASRKKKLLDLYSALKREDKTWAELKIREIEGRTEADFRIKKLYLYYMQQGRCMYSGEKIELNDLFNNNLYDIDHIYPRHFIKDDSLENNLVLVKKQINNHKSDNYPLESDIRKNMNEFWKSLREKNFISKEKYSRLIRTEEFTDEEKAAFISRQL

SEQ ID NO: 5410 - protein, 164 aa, unidentified; identical to SEQ ID NO: 5399
  REGION 1..164: note = Description of Unknown: uncultivated organism with predicted taxonomy: Butyrivibrio sp. CAG:318
  REGION 1..164: note = MG23-22 HNH domain

SEQ ID NO: 5411 - protein, 164 aa, unidentified; identical to SEQ ID NO: 5405
  REGION 1..164: note = Description of Unknown: uncultivated organism with predicted taxonomy: Butyrivibrio sp. CAG:318
  REGION 1..164: note = MG23-23 HNH domain

SEQ ID NO: 5412 - protein, 165 aa, unidentified
  REGION 1..165: note = Description of Unknown: uncultivated organism with predicted taxonomy: Clostridiales
  REGION 1..165: note = MG23-24 HNH domain
EHESSNERKASRKKKLLDLYKAVKSEQKQWAEHKITEIDKRDEADFRIKKLYLYYIQQGKCMYSGDTIDLDLLLKNNNIYDIDHIYPRHFIKDDSIDNNLVLVKKEINNHKSDKYPLESDIREDMSGFWKYLCEKKFITKEKYNRLMRTEKFSAEEKAAFVNRQL

SEQ ID NO: 5413 - protein, 164 aa, unidentified
  REGION 1..164: note = Description of Unknown: uncultivated organism with predicted taxonomy: Butyrivibrio sp. CAG:318
  REGION 1..164: note = MG23-25 HNH domain
EHGKENDRKASRKKKLLDLYSALKRENKTWAELKIREIEGKTEADFRIKKLYLYYMQQGRCMYSGEKIELNDLFNNNLYDIDHIYPRHFIKDDSLENNLVLVKKQINNHKSDNYPLESNIRKNMNEFWKTLRDKNFISKEKYSRLIRTEEFTDEEKAAFISRQL

SEQ ID NO: 5414 - protein, 164 aa, unidentified; identical to SEQ ID NO: 5399
  REGION 1..164: note = Description of Unknown: uncultivated organism with predicted taxonomy: Butyrivibrio sp. CAG:318
  REGION 1..164: note = MG23-26 HNH domain

SEQ ID NO: 5415 - protein, 164 aa, unidentified; identical to SEQ ID NO: 5399
  REGION 1..164: note = Description of Unknown: uncultivated organism with predicted taxonomy: Butyrivibrio sp. CAG:318
  REGION 1..164: note = MG23-27 HNH domain

SEQ ID NO: 5416 - protein, 164 aa, unidentified; identical to SEQ ID NO: 5405
  REGION 1..164: note = Description of Unknown: uncultivated organism with predicted taxonomy: Butyrivibrio sp. CAG:318
  REGION 1..164: note = MG23-28 HNH domain

SEQ ID NO: 5417 - protein, 164 aa, unidentified; identical to SEQ ID NO: 5399
  REGION 1..164: note = Description of Unknown: uncultivated organism with predicted taxonomy: Butyrivibrio sp. CAG:318
  REGION 1..164: note = MG23-29 HNH domain

SEQ ID NO: 5418 - protein, 164 aa, unidentified; identical to SEQ ID NO: 5403
  REGION 1..164: note = Description of Unknown: uncultivated organism with predicted taxonomy: Butyrivibrio sp. CAG:318
  REGION 1..164: note = MG23-30 HNH domain

SEQ ID NO: 5419 - protein, 164 aa, unidentified; identical to SEQ ID NO: 5399
  REGION 1..164: note = Description of Unknown: uncultivated organism with predicted taxonomy: Butyrivibrio sp. CAG:318
  REGION 1..164: note = MG23-31 HNH domain

SEQ ID NO: 5420 - protein, 164 aa, unidentified
  REGION 1..164: note = Description of Unknown: uncultivated organism with predicted taxonomy: Butyrivibrio sp. CAG:318
  REGION 1..164: note = MG23-32 HNH domain
EHGKENDRKASRKKKLLDLYSALKREDKTWAELKIREIEGKTEADFRIKKLYLYYMQQGRCMYSGEKIELNDLFNNNLYDIDHIYPRHFIKDDSLENNLVLVKKQINNHKSDNYPLESNIRKNMNEFWKTLRDKNFISKEKYSRLIRTEEFTDEEKAAFISRQL

SEQ ID NO: 5421 - protein, 165 aa, unidentified; identical to SEQ ID NO: 5406
  REGION 1..165: note = Description of Unknown: uncultivated organism with predicted taxonomy: Clostridiales
  REGION 1..165: note = MG23-33 HNH domain

SEQ ID NO: 5422 - protein, 164 aa, unidentified; identical to SEQ ID NO: 5405
  REGION 1..164: note = Description of Unknown: uncultivated organism with predicted taxonomy: Butyrivibrio sp. CAG:318
  REGION 1..164: note = MG23-34 HNH domain

SEQ ID NO: 5423 - protein, 164 aa, unidentified
  REGION 1..164: note = Description of Unknown: uncultivated organism with predicted taxonomy: Butyrivibrio sp. CAG:318
  REGION 1..164: note = MG23-35 HNH domain
EHGKENDRKASRKKKLLDLYSALKREDKTWAELKIREIEGRTEADFRIKKLYLYYMQQGRCMYSGEKIELNDLFNNNLYDIDHIYPRHFIKDDSLENNLVLVKKQINNHKSDNYPLESNIRKNMNEFWKTLRDKNFISKEKYSRLIRTEEFTDEEKAAFISRQL

SEQ ID NO: 5424 - protein, 165 aa, unidentified
  REGION 1..165: note = Description of Unknown: uncultivated organism with predicted taxonomy: Clostridiales
  REGION 1..165: note = MG23-36 HNH domain
EHESGNERKASRKKKLLDLYKAVKSEQKQWAEHKITEIDKRDEADFRIKKLYLYYIQQGKCMYSGDTIDLDLLLKNNNIYDIDHIYPRHFIKDDSIDNNLVLVKKEINNHKSDKYPLESDIREDMSGFWKYLCEKKFITKEKYNRLMRTEKFSAEEKAAFVNRQL

SEQ ID NO: 5425 - protein, 165 aa, unidentified; identical to SEQ ID NO: 5412
  REGION 1..165: note = Description of Unknown: uncultivated organism with predicted taxonomy: Clostridiales
  REGION 1..165: note = MG23-37 HNH domain

SEQ ID NO: 5426 - protein, 164 aa, unidentified; identical to SEQ ID NO: 5399
  REGION 1..164: note = Description of Unknown: uncultivated organism with predicted taxonomy: Butyrivibrio sp. CAG:318
  REGION 1..164: note = MG23-38 HNH domain

SEQ ID NO: 5427 - protein, 164 aa, unidentified; identical to SEQ ID NO: 5403
  REGION 1..164: note = Description of Unknown: uncultivated organism with predicted taxonomy: Butyrivibrio sp. CAG:318
  REGION 1..164: note = MG23-39 HNH domain

SEQ ID NO: 5428 - protein, 164 aa, unidentified
  REGION 1..164: note = Description of Unknown: uncultivated organism with predicted taxonomy: Butyrivibrio sp. CAG:318
  REGION 1..164: note = MG23-40 HNH domain
EHGKENDRKASRKKKLLDLYSALKRENKTWAELKIREIEGKTEADFRIKKLYLYYMQQGKCMYSGEKIELNDLFNNNLYDIDHIYPRHFIKDDSLENNLVLVKKQINNHKSDNYPLESDIRKNMNKFWKSLREKNFISEEKYSRLIRTEEFTDEEKAAFISRQL

SEQ ID NO: 5429 - protein, 165 aa, unidentified; identical to SEQ ID NO: 5406
  REGION 1..165: note = Description of Unknown: uncultivated organism with predicted taxonomy: Clostridiales
  REGION 1..165: note = MG23-41 HNH domain

SEQ ID NO: 5430 - protein, 164 aa, unidentified; identical to SEQ ID NO: 5420
  REGION 1..164: note = Description of Unknown: uncultivated organism with predicted taxonomy: Butyrivibrio sp. CAG:318
  REGION 1..164: note = MG23-42 HNH domain

SEQ ID NO: 5431 - protein, 164 aa, unidentified; identical to SEQ ID NO: 5399
  REGION 1..164: note = Description of Unknown: uncultivated organism with predicted taxonomy: Butyrivibrio sp. CAG:318
  REGION 1..164: note = MG23-43 HNH domain

SEQ ID NO: 5432 - protein, 164 aa, unidentified; identical to SEQ ID NO: 5400
  REGION 1..164: note = Description of Unknown: uncultivated organism with predicted taxonomy: Butyrivibrio sp. CAG:318
  REGION 1..164: note = MG23-44 HNH domain

SEQ ID NO: 5433 - protein, 164 aa, unidentified; identical to SEQ ID NO: 5399
  REGION 1..164: note = Description of Unknown: uncultivated organism with predicted taxonomy: Butyrivibrio sp. CAG:318
  REGION 1..164: note = MG23-45 HNH domain

SEQ ID NO: 5434 - protein, 165 aa, unidentified
  REGION 1..165: note = Description of Unknown: uncultivated organism with predicted taxonomy: Clostridiales
  REGION 1..165: note = MG23-46 HNH domain
EHENGNERKASRKKKLLDLYKAIKSEQKQWAEQMIAEIDKRDEADFRIKKLYLYYIQQGKCMYSGDTIDLDLLLKNNNIYDIDHIYPRHFIKDDSIDNNLVLVKKEINNHKSDKYPLESDIKKDMSGFWKYLCEKKFITKEKYNRLMRTDKFSAEEKAAFVNRQL

SEQ ID NO: 5435 - protein, 164 aa, unidentified; identical to SEQ ID NO: 5428
  REGION 1..164: note = Description of Unknown: uncultivated organism with predicted taxonomy: Butyrivibrio sp. CAG:318
  REGION 1..164: note = MG23-47 HNH domain

SEQ ID NO: 5436 - protein, 164 aa, unidentified; identical to SEQ ID NO: 5399
  REGION 1..164: note = Description of Unknown: uncultivated organism with predicted taxonomy: Butyrivibrio sp. CAG:318
  REGION 1..164: note = MG23-48 HNH domain

SEQ ID NO: 5437 - protein, 165 aa, unidentified; identical to SEQ ID NO: 5412
  REGION 1..165: note = Description of Unknown: uncultivated organism with predicted taxonomy: Clostridiales
  REGION 1..165: note = MG23-49 HNH domain

SEQ ID NO: 5438 - protein, 164 aa, unidentified
  REGION 1..164: note = Description of Unknown: uncultivated organism with predicted taxonomy: Clostridiales
  REGION 1..164: note = MG23-50 HNH domain
EEGIKNERKNSRKKKLLELYTSIKNEQKAWSEVKIREIDGRTETDFRIKKLYLYYLQHGKCMYSGEKIELNDLFNNNLYDIDHIYPRHFIKDDSIENNLVLVKKQINNHKSDTFPIESSIQKNMMTFWKTLVEHNFITKEKYNRLMRTEEFTDEEKAAFISRQL

SEQ ID NO: 5439 - protein, 165 aa, unidentified
  REGION 1..165: note = Description of Unknown: uncultivated organism with predicted taxonomy: Clostridiales
  REGION 1..165: note = MG23-51 HNH domain
EHENGNERKASRKKKLLDLYKAIKSEQKQWAEQMIAEIDKRDEADFRIKKLYLYYIQQGKCMYSGDTIDLDLLLKNNNIYDIDHIYPRHFIKDDSIDNNLVLVKKEINNHKSDKYPLESDIREDMSGFWKYLCEKKFITKEKYNRLMRTEKFSAEEKAAFVNRQL

SEQ ID NO: 5440 - protein, 164 aa, unidentified; identical to SEQ ID NO: 5420
  REGION 1..164: note = Description of Unknown: uncultivated organism with predicted taxonomy: Butyrivibrio sp. CAG:318
  REGION 1..164: note = MG23-52 HNH domain

SEQ ID NO: 5441 - protein, 164 aa, unidentified; identical to SEQ ID NO: 5399
  REGION 1..164: note = Description of Unknown: uncultivated organism with predicted taxonomy: Butyrivibrio sp. CAG:318
  REGION 1..164: note = MG23-53 HNH domain

SEQ ID NO: 5442 - protein, 164 aa, unidentified; identical to SEQ ID NO: 5405
  REGION 1..164: note = Description of Unknown: uncultivated organism with predicted taxonomy: Butyrivibrio sp. CAG:318
  REGION 1..164: note = MG23-54 HNH domain

SEQ ID NO: 5443 - protein, 164 aa, unidentified; identical to SEQ ID NO: 5399
  REGION 1..164: note = Description of Unknown: uncultivated organism with predicted taxonomy: Butyrivibrio sp. CAG:318
  REGION 1..164: note = MG23-55 HNH domain

SEQ ID NO: 5444 - protein, 164 aa, unidentified; identical to SEQ ID NO: 5405
  REGION 1..164: note = Description of Unknown: uncultivated organism with predicted taxonomy: Butyrivibrio sp. CAG:318
  REGION 1..164: note = MG23-56 HNH domain

SEQ ID NO: 5445 - protein, 164 aa, unidentified; identical to SEQ ID NO: 5399
  REGION 1..164: note = Description of Unknown: uncultivated organism with predicted taxonomy: Butyrivibrio sp. CAG:318
  REGION 1..164: note = MG23-57 HNH domain

SEQ ID NO: 5446 - protein, 164 aa, unidentified; identical to SEQ ID NO: 5405
  REGION 1..164: note = Description of Unknown: uncultivated organism with predicted taxonomy: Butyrivibrio sp. CAG:318
  REGION 1..164: note = MG23-58 HNH domain

SEQ ID NO: 5447 - protein, 165 aa, unidentified; identical to SEQ ID NO: 5406
  REGION 1..165: note = Description of Unknown: uncultivated organism with predicted taxonomy: Clostridiales
  REGION 1..165: note = MG23-59 HNH domain

SEQ ID NO: 5448 - protein, 165 aa, unidentified
  REGION 1..165: note = Description of Unknown: uncultivated organism with predicted taxonomy: Clostridiales
  REGION 1..165: note = MG23-60 HNH domain
EHESGNERKASRKKKLLDLYKAVKSEQKQWAEHKITEIDKRDEADFRIKKLYLYYIQQGKCMYSGDTIDLDLLLKNNNIYDIDHIYPRHFIKDDSIDNNLVLVKKEINNHKSDKYPLESDIREDMSGFWKYLCEKKFITKEKYNRLMRTEKFSAEEKATFVNRQL

SEQ ID NO: 5449 - protein, 93 aa, unidentified
  REGION 1..93: note = Description of Unknown: uncultivated organism with predicted taxonomy: Clostridiales
  REGION 1..93: note = MG23-61 HNH domain
EHENGNERKASRKKKLLDLYKAIKSEQKQWAEQMIAEIDKRDEADFRIKKLYLYYIQQGKCMYSGDTIDLDLLLKNNNIYDIDHIYPRHFIKD

SEQ ID NO: 5450 - protein, 164 aa, unidentified; identical to SEQ ID NO: 5405
  REGION 1..164: note = Description of Unknown: uncultivated organism with predicted taxonomy: Butyrivibrio sp. CAG:318
  REGION 1..164: note = MG23-62 HNH domain

SEQ ID NO: 5451 - protein, 164 aa, unidentified
  REGION 1..164: note = Description of Unknown: uncultivated organism with predicted taxonomy: Butyrivibrio sp. CAG:318
  REGION 1..164: note = MG23-63 HNH domain
EHGKENDRKASRKKKLLDLYSTLKREDKTWAELKIREIEGRTEADFRIKKLYLYYMQQGRCMYSGEKIELNDLFNNNLYDIDHIYPRHFIKDDSLENNLVLVKKQINNHKSDNYPLESNIRKNMNEFWKTLREKNFISKEKYSRLIRTEEFTDEEKAAFISRQL

SEQ ID NO: 5452 - protein, 165 aa, unidentified; identical to SEQ ID NO: 5434
  REGION 1..165: note = Description of Unknown: uncultivated organism with predicted taxonomy: Clostridiales
  REGION 1..165: note = MG23-64 HNH domain

SEQ ID NO: 5453 - protein, 165 aa, unidentified; identical to SEQ ID NO: 5398
  REGION 1..165: note = Description of Unknown: uncultivated organism with predicted taxonomy: Clostridiales
  REGION 1..165: note = MG23-65 HNH domain

SEQ ID NO: 5454 - protein, 164 aa, unidentified; identical to SEQ ID NO: 5423
  REGION 1..164: note = Description of Unknown: uncultivated organism with predicted taxonomy: Butyrivibrio sp. CAG:318
  REGION 1..164: note = MG23-66 HNH domain

SEQ ID NO: 5455 - protein, 164 aa, unidentified; identical to SEQ ID NO: 5405
  REGION 1..164: note = Description of Unknown: uncultivated organism with predicted taxonomy: Butyrivibrio sp. CAG:318
  REGION 1..164: note = MG23-67 HNH domain

SEQ ID NO: 5456 - protein, 164 aa, unidentified; identical to SEQ ID NO: 5423
  REGION 1..164: note = Description of Unknown: uncultivated organism with predicted taxonomy: Butyrivibrio sp. CAG:318
  REGION 1..164: note = MG23-68 HNH domain

SEQ ID NO: 5457 - protein, 164 aa, unidentified
  REGION 1..164: note = Description of Unknown: uncultivated organism with predicted taxonomy: Butyrivibrio sp. CAG:318
  REGION 1..164: note = MG23-69 HNH domain
EHGKENDRKASRKKKLLDLYSALKRENKTWAELKIREIEGKTEADFRIKKLYLYYMQQGKCMYSGEKIELNDLFNNNLYDIDHIYPRHFIKDDSLENNLVLVKKEINNHKSDNYPLESDIRKNMNKFWKSLRDKNFISKEKYSRLIRTEEFTDEEKAAFISRQL

SEQ ID NO: 5458 - protein, 164 aa, unidentified; identical to SEQ ID NO: 5405
  REGION 1..164: note = Description of Unknown: uncultivated organism with predicted taxonomy: Butyrivibrio sp. CAG:318
  REGION 1..164: note = MG23-70 HNH domain

SEQ ID NO: 5459 - protein, 140 aa, unidentified
  REGION 1..140: note = Description of Unknown: uncultivated organism with predicted taxonomy: Butyrivibrio sp. YAB3001
  REGION 1..140: note = MG23-71 HNH domain
EEGEKGKRTESRKKKLEFLYKGQKQFLQEIGKRDERDFRQKKLYLYYLQNGKSMYTGNEIDLDELLSNNSKYDIDHIYPRHYIKDDSLDNNLVLVEKEINNDIKGGDYPISKTIQSKMRSFWKELQEKGFITSEKYNRLV

SEQ ID NO: 5460 - protein, 164 aa, unidentified
  REGION 1..164: note = Description of Unknown: uncultivated organism with predicted taxonomy: Eubacterium
  REGION 1..164: note = MG23-72 HNH domain
EEGIKNERKNSRKKKLLELYTSIKNEQKAWSEVKIREIDGRTETDFRIKKLYLYYLQQGKCMYSGEKIELNDLFNNNLYDIDHIYPRHFIKDDSIENNLVLVKKQINNHKSDTFPIESSIQKNMMTFWKTLVEHNFITKEKYNRLMRTEEFTDEEKAAFISRQL

SEQ ID NO: 5461 - RNA, 121 nt, synthetic construct
  misc_feature 1..121: note = Description of Artificial Sequence: Synthetic polynucleotide
  misc_feature 1..121: note = MG1-4 sgRNA
  misc_difference 1..22: note = a, c, u, g, unknown or other
  source 1..121: mol_type = other RNA
nnnnnnnnnnnnnnnnnnnnnngttttgatttactcgaaagagtccaatcataattgaccggagaataattgattcctctacaatgtacgaataaattcattctctaaaccttaaaaattt

SEQ ID NO: 5462 - RNA, 99 nt, synthetic construct
  misc_feature 1..99: note = Description of Artificial Sequence: Synthetic oligonucleotide
  misc_feature 1..99: note = MG1-5 sgRNA
  misc_difference 1..22: note = a, c, u, g, unknown or other
  source 1..99: mol_type = other RNA
nnnnnnnnnnnnnnnnnnnnnngttttgacttgaaaaagtcttaactgattttgccgaattttaagctctacgtagtaccttggaattcggcatatttt

SEQ ID NO: 5463 - RNA, 99 nt, synthetic construct
  misc_feature 1..99: note = Description of Artificial Sequence: Synthetic oligonucleotide
  misc_feature 1..99: note = MG1-6 sgRNA
  misc_difference 1..22: note = a, c, u, g, unknown or other
  source 1..99: mol_type = other RNA
nnnnnnnnnnnnnnnnnnnnnngttttgacttgaaaaagtcttaactgattttgccgaatttcaagctctgcattgcaccttggcattcggcatatttt

SEQ ID NO: 5464 - RNA, 99 nt, synthetic construct
  misc_feature 1..99: note = Description of Artificial Sequence: Synthetic oligonucleotide
  misc_feature 1..99: note = MG1-7 sgRNA
  misc_difference 1..22: map = a, c, u, g, unknown or other
  source 1..99: mol_type = other RNA
nnnnnnnnnnnnnnnnnnnnnngttttgactttgaaaaaagtcttaactgattttgccgaattttaagctctgcatggcaccttgaaattcggcatttt

SEQ ID NO: 5465 - RNA, 100 nt, synthetic construct
  misc_feature 1..100: note = Description of Artificial Sequence: Synthetic polynucleotide
  misc_feature 1..100: note = MG2-7 sgRNA
  misc_difference 1..22: note = a, c, u, g, unknown or other
  source 1..100: mol_type = other RNA
nnnnnnnnnnnnnnnnnnnnnngctttgccttggaaacaagacaaagttaattaaggcagttcggacctctactttgtacgtcaggatagaaagcctttt

SEQ ID NO: 5466 - RNA, 110 nt, synthetic construct
  misc_feature 1..110: note = Description of Artificial Sequence: Synthetic polynucleotide
  misc_feature 1..110: note = MG3-6 sgRNA
  misc_difference 1..22: note = a, c, u, g, unknown or other
  source 1..110: mol_type = other RNA
nnnnnnnnnnnnnnnnnnnnnngttgagaatcgaaagattcttaataaggcatccttccgatgctgacttctcaccgtccgttttccaataggagcgggcggtatgtttt

SEQ ID NO: 5467 - RNA, 110 nt, synthetic construct
  misc_feature 1..110: note = Description of Artificial Sequence: Synthetic polynucleotide
  misc_feature 1..110: note = MG3-7 sgRNA
  misc_difference 1..22: note = a, c, u, g, unknown or other
  source 1..110: mol_type = other RNA
nnnnnnnnnnnnnnnnnnnnnngttgggaaccgaaaggttcccaataaggcgcatcttggcgctgacttctcaccgtcctcttgctgcttagcagagggcggtatgtttt

SEQ ID NO: 5468 - RNA, 124 nt, synthetic construct
  misc_feature 1..124: note = Description of Artificial Sequence: Synthetic polynucleotide
  misc_feature 1..124: note = MG4-5 sgRNA
  misc_difference 1..22: note = a, c, u, g, unknown or other
  source 1..124: mol_type = other RNA
nnnnnnnnnnnnnnnnnnnnnngctgtggcttgcgggggaaaccccttgtcacagtaagggactttcgttcgcgaaaggcaacctcgccagcatcgctgggcgaggaccagggcaaggcgattt

SEQ ID NO: 5469 - RNA, 118 nt, synthetic construct
  misc_feature 1..118: note = Description of Artificial Sequence: Synthetic polynucleotide
  misc_feature 1..118: note = MG14-1 sgRNA
  misc_difference 1..22: note = a, c, u, g, unknown or other
  source 1..118: mol_type = other RNA
nnnnnnnnnnnnnnnnnnnnnngtcttgagcgaaagctccagacaaggggagccacttaagtggcttacccgtaaagtaacccccgttcaatcttcggattgggcggggcgaactttt

SEQ ID NO: 5470 - RNA, 118 nt, synthetic construct
  misc_feature 1..118: note = Description of Artificial Sequence: Synthetic polynucleotide
  misc_feature 1..118: note = MG15-1 sgRNA
  misc_difference 1..22: note = a, c, u, g, unknown or other
  source 1..118: mol_type = other RNA
nnnnnnnnnnnnnnnnnnnnnngttgtaattccctagaaataggttattacaataaggtccaacaggagtgttggtaccgtaaagctctaacggcacccacgggtgccgttatctttt

SEQ ID NO: 5471 - RNA, 162 nt, synthetic construct
  misc_feature 1..162: note = Description of Artificial Sequence: Synthetic polynucleotide
  misc_feature 1..162: note = MG16-2 sgRNA
  misc_difference 1..22: note = a, c, u, g, unknown or other
  source 1..162: mol_type = other RNA
nnnnnnnnnnnnnnnnnnnnnngttgtgaattgctttaaattgaaaaatttaagcaattcacaataaggattattccgttgtgaaaacatttaaagcggggtcaacagcctcgctttctttttgagtctatgagacattaggtcaataagtctatgagtttt

SEQ ID NO: 5472 - RNA, 101 nt, synthetic construct
  misc_feature 1..101: note = Description of Artificial Sequence: Synthetic polynucleotide
  misc_feature 1..101: note = MG18-1 sgRNA
  misc_difference 1..22: note = a, c, u, g, unknown or other
  source 1..101: mol_type = other RNA
nnnnnnnnnnnnnnnnnnnnnngtttgagagtagtgaaaactacgagttcaaatacaattttttcaaattgccctatagggccctcacagtgtgagatttt

SEQ ID NO: 5473 - RNA, 117 nt, synthetic construct
  misc_feature 1..117: note = Description of Artificial Sequence: Synthetic polynucleotide
  misc_feature 1..117: note = MG21-1 sgRNA
  misc_difference 1..22: note = a, c, u, g, unknown or other
  source 1..117: mol_type = other RNA
nnnnnnnnnnnnnnnnnnnnnngttgtagttccccttttgaaaaaaagtgtgttactgcaataaggtaaaacaccacgaagctctgccctaactgccttagcagttagggcatcttt

SEQ ID NO: 5474 - RNA, 134 nt, synthetic construct
  misc_feature 1..134: note = Description of Artificial Sequence: Synthetic polynucleotide
  misc_feature 1..134: note = MG22-1 sgRNA
  misc_difference 1..22: note = a, c, u, g, unknown or other
  source 1..134: mol_type = other RNA
nnnnnnnnnnnnnnnnnnnnnngttgtgaattgctttcaaattagaaataattgaaagcaattcgcaataaggattattccgttgtgaaaacatttcgagtggcttcgtgaaattcacgaagtcacttcgtttt

SEQ ID NO: 5475 - RNA, 113 nt, synthetic construct
  misc_feature 1..113: note = Description of Artificial Sequence: Synthetic polynucleotide
  misc_feature 1..113: note = MG23-1 sgRNA
  misc_difference 1..22: note = a, c, u, g, unknown or other
  source 1..113: mol_type = other RNA
nnnnnnnnnnnnnnnnnnnnnngtttgagaacctgaaaaggtgagtgcaaataaggtttaaccgaaattgtttacctgcattgtgcagtataagaaagaccgcgaggtctttt

SEQ ID NO: 5476 - RNA, 99 nt, unidentified
  misc_feature 1..99: note = Description of Unknown: uncultivated organism with predicted taxonomy: Candidatus Melainabacteria
  misc_feature 1..99: note = MG1-4 tracrRNA
  source 1..99: mol_type = other RNA
taaaatattttaagttaagagtccaatcataattgaccggagaataattgattcctctacaatgtacgaataaattcattctctaaaccttaaaaattt

SEQ ID NO: 5477 - RNA, 72 nt, unidentified
  misc_feature 1..72: note = Description of Unknown: uncultivated organism with predicted taxonomy: Verrucomicrobia
  misc_feature 1..72: note = MG1-5 tracrRNA
  source 1..72: mol_type = other RNA
ttagttgtaaagtcttaactgattttgccgaattttaagctctacgtagtaccttggaattcggcatatttt

SEQ ID NO: 5478 - RNA, 72 nt, unidentified
  misc_feature 1..72: note = Description of Unknown: uncultivated organism with predicted taxonomy: unclassified Verrucomicrobia (miscellaneous)
  misc_feature 1..72: note = MG1-6 tracrRNA
  source 1..72: mol_type = other RNA
tttgttgtaaagtcttaactgattttgccgaatttcaagctctgcattgcaccttggcattcggcatatttt

SEQ ID NO: 5479 - RNA, 78 nt, unidentified
  misc_feature 1..78: note = Description of Unknown: uncultivated organism with predicted taxonomy: unclassified Verrucomicrobia (miscellaneous)
  misc_feature 1..78: note = MG1-7 tracrRNA
  source 1..78: mol_type = other RNA
agaaaatttttgttgtaaagtcttaactgattttgccgaattttaagctctgcatggcaccttgaaattcggcatttt

SEQ ID NO: 5480 - RNA, 106 nt, unidentified
  misc_feature 1..106: note = Description of Unknown: uncultivated organism
  misc_feature 1..106: note = MG1-1
  source 1..106: mol_type = other RNA
ctctccggggggagaagtcttaactgattcggcggcgttgaaaccactgcctagcacgtttcaacgccgccctttattcccaaaactcgacctgctgttgaatttt

SEQ ID NO: 5481 - RNA, 77 nt, unidentified
  misc_feature 1..77: note = Description of Unknown: uncultivated organism with predicted taxonomy: Verrucomicrobia
  misc_feature 1..77: note = MG1-2
  source 1..77: mol_type = other RNA
gacttttctggggagtgaagtcttaactgatttagccccgcagtgaccactgcttgcacgtcactgcggggcctttt

SEQ ID NO: 5482 - RNA, 383 nt, unidentified
  misc_feature 1..383: note = Description of Unknown: uncultivated organism
  misc_feature 1..383: note = MG1-3
  misc_difference 61..62: note = a, c, u, g, unknown or other
  misc_difference 110..111: note = a, c, u, g, unknown or other
  misc_difference 177..178: note = a, c, u, g, unknown or other
  misc_difference 239..240: note = a, c, u, g, unknown or other
  misc_difference 301..302: note = a, c, u, g, unknown or other
  misc_difference 363..364: note = a, c, u, g, unknown or other
  source 1..383: mol_type = other RNA
gataccggagaattttgggcttccctgatagccatttcaaaaagggtttgataggattgtnntataaggtttgtagagcatgttgggaatgtatcttcaaaagaatttgnnggcgtataaaagaaaaactcagaaacacattgttctgagtttttttctgtcccgaccgttgattgnntaaaggtcctttttcttacagacaaacaatgggaaaagtcagtcaattgcatcggaaaagnnaatatgagcacagcaaaaaactcctcgacccagcacagccggaactctttgaaatttggtnnaaaggaaagccacgactggtgcttttctggaaagcagtgcagccgtttctttcctattcgnnttaagatttacccgactcg

SEQ ID NO: 5483 - RNA, 383 nt, unidentified; identical to SEQ ID NO: 5482
  misc_feature 1..383: note = Description of Unknown: uncultivated organism
  misc_feature 1..383: note = MG1-3
  misc_difference 61..62: note = a, c, u, g, unknown or other
  misc_difference 110..111: note = a, c, u, g, unknown or other
  misc_difference 177..178: note = a, c, u, g, unknown or other
  misc_difference 239..240: note = a, c, u, g, unknown or other
  misc_difference 301..302: note = a, c, u, g, unknown or other
  misc_difference 363..364: note = a, c, u, g, unknown or other
  source 1..383: mol_type = other RNA

SEQ ID NO: 5484 - RNA, 70 nt, unidentified
  misc_feature 1..70: note = Description of Unknown: uncultivated organism
  misc_feature 1..70: note = MG1-8
  source 1..70: mol_type = other RNA
ggggggaaggcttaactgacgtagaggcccgtgacccactgcatcgcacggtcacgggcctcggtgtttt

SEQ ID NO: 5485 - RNA, 70 nt, unidentified; identical to SEQ ID NO: 5484
  misc_feature 1..70: note = Description of Unknown: uncultivated organism with predicted taxonomy: Verrucomicrobia
  misc_feature 1..70: note = MG1-9
  source 1..70: mol_type = other RNA

SEQ ID NO: 5486 - RNA, 100 nt, unidentified
  misc_feature 1..100: note = Description of Unknown: uncultivated organism
  misc_feature 1..100: note = MG1-10
  source 1..100: mol_type = other RNA
acttcaaaaccagcaccccaagtagcgtaggagagcgcgttcgatcttggattcaggtgtgactccactacgaaagccccttgatttctcaagggtcttt

SEQ ID NO: 5487 - RNA, 69 nt, unidentified
  misc_feature 1..69: note = Description of Unknown: uncultivated organism
  misc_feature 1..69: note = MG1-11
  source 1..69: mol_type = other RNA
ggcgatttcaaaaccagcacggattcggcagcccctctgcggggcaagcgtaggtagagcgcgccgttt

SEQ ID NO: 5488 - RNA, 108 nt, unidentified
  misc_feature 1..108: note = Description of Unknown: uncultivated organism
  misc_feature 1..108: note = MG1-12
  source 1..108: mol_type = other RNA
cgagatcaaaacctgcggtggccagtattccaaactgtcggcttgagagcaggctggttattaaccgcaactcttgcacgggggcgagtgaaagctttagcccctttt

SEQ ID NO: 5489 - RNA, 106 nt, unidentified; identical to SEQ ID NO: 5480
  misc_feature 1..106: note = Description of Unknown: uncultivated organism
  misc_feature 1..106: note = MG1-14
  source 1..106: mol_type = other RNA

SEQ ID NO: 5490 - RNA, 101 nt, unidentified
  misc_feature 1..101: note = Description of Unknown: uncultivated organism
  misc_feature 1..101: note = MG2-1 tracrRNA
  source 1..101: mol_type = other RNA
gccagatcaaaacctgcggaatggtcggttcgagagccacccataagaacccgcaactcgaacacactttccggggcgagccagatgctcgccccgctttt

SEQ ID NO: 5491 - RNA, 70 nt, unidentified
  misc_feature 1..70: note = Description of Unknown: uncultivated organism
  misc_feature 1..70: note = MG2-7 tracrRNA
  source 1..70: mol_type = other RNA
ttggaatcaagacaaagttaattaaggcagttcggacctctactttgtacgtcaggatagaaagcctttt

SEQ ID NO: 5492 - RNA, 118 nt, unidentified
  misc_feature 1..118: note = Description of Unknown: uncultivated organism with predicted taxonomy: Verrucomicrobia
  misc_feature 1..118: note = MG2-5
  source 1..118: mol_type = other RNA
ttggaatcaagacaaagttagataacgcaaactgcgtccctatccgccaagcggatacacctgttcaaaagcgtttcttaaagagcctcggcagggagtaatctcggtcggggctttt

SEQ ID NO: 5493 - RNA, 74 nt, unidentified
  misc_feature 1..74: note = Description of Unknown: uncultivated organism with predicted taxonomy: Verrucomicrobia
  misc_feature 1..74: note = MG2-8
  source 1..74: mol_type = other RNA
ggaatcaagacaaagttagataacgcagaccgtttccctatccgccacgcggatacatcggttcaaaagcgttt

SEQ ID NO: 5494 - RNA, 74 nt, unidentified; identical to SEQ ID NO: 5493
  misc_feature 1..74: note = Description of Unknown: uncultivated organism with predicted taxonomy: Verrucomicrobia
  misc_feature 1..74: note = MG2-10
  source 1..74: mol_type = other RNA

SEQ ID NO: 5495 - RNA, 82 nt, unidentified
  misc_feature 1..82: note = Description of Unknown: uncultivated organism with predicted taxonomy: Rothia
  misc_feature 1..82: note = MG3-6 tracrRNA
  source 1..82: mol_type = other RNA
taacgaaagattcttaataaggcatccttccgatgctgacttctcaccgtccgttttccaataggagcgggcggtatgtttt

SEQ ID NO: 5496 - RNA, 80 nt, unidentified
  misc_feature 1..80: note = Description of Unknown: uncultivated organism with predicted taxonomy: Rothia
  misc_feature 1..80: note = MG3-7 tracrRNA
  source 1..80: mol_type = other RNA
aatgaaggttcccaataaggcgcatcttggcgctgacttctcaccgtcctcttgctgcttagcagagggcggtatgtttt

SEQ ID NO: 5497 - RNA, 82 nt, unidentified
  misc_feature 1..82: note = Description of Unknown: uncultivated organism with predicted taxonomy: Rothia
  misc_feature 1..82: note = MG3-8 tracrRNA
  source 1..82: mol_type = other RNA
taacgaaagattcttaataaggcatccttccgatgctgacttctcaccgtccggctcctcttaggaacgggcggtatgtttt

SEQ ID NO: 5498 - RNA, 78 nt, unidentified
  misc_feature 1..78: note = Description of Unknown: uncultivated organism with predicted taxonomy: Dermabacter hominis
  misc_feature 1..78: note = MG3-1
  source 1..78: mol_type = other RNA
tcttgggagagacattgaaataagcggtttcgtaccgtgaattctccagcccctcggtttaccggggggcttcgtttt

SEQ ID NO: 5499 - RNA, 88 nt, unidentified
  misc_feature 1..88: note = Description of Unknown: uncultivated organism with predicted taxonomy: Micrococcales
  misc_feature 1..88: note = MG3-5
  source 1..88: mol_type = other RNA
tggtttcggaggcgaacgatcccaataagagacttatgtcttgaattctcagatcccgtccgcattgcgcggacgggatcttcgtttt

SEQ ID NO: 5500 - RNA, 81 nt, unidentified
  misc_feature 1..81: note = Description of Unknown: uncultivated organism with predicted taxonomy: Rothia
  misc_feature 1..81: note = MG3-6
  source 1..81: mol_type = other RNA
agagaagattcccaataaggcacatttttagtgctgacttctcaccgtccagggttcattgaacaatgggcggtatgtttt

SEQ ID NO: 5501 - RNA, 72 nt, unidentified
  misc_feature 1..72: note = Description of Unknown: uncultivated organism with predicted taxonomy: Rothia
  misc_feature 1..72: note = MG3-7
  source 1..72: mol_type = other RNA
tgaaagattctcaacattctacaacttatcacatagcacattgcaattatagcaggagtatatgtagctttt

SEQ ID NO: 5502 - RNA, 82 nt, unidentified; identical to SEQ ID NO: 5497
  misc_feature 1..82: note = Description of Unknown: uncultivated organism with predicted taxonomy: Rothia
  misc_feature 1..82: note = MG3-8
  source 1..82: mol_type = other RNA

SEQ ID NO: 5503 - RNA, 103 nt, unidentified
  misc_feature 1..103: note = Description of Unknown: uncultivated organism with predicted taxonomy: Planctomycetes
  misc_feature 1..103: note = MG4-5 tracrRNA
  source 1..103: mol_type = other RNA
agtgtatccgagcggcgattgccccttgtcacagtaagggactttcgttcgcgaaaggcaacctcgccagcatcgctgggcgaggaccagggcaaggcgattt

SEQ ID NO: 5504 - RNA, 98 nt, unidentified
  misc_feature 1..98: note = Description of Unknown: uncultivated organism with predicted taxonomy: Arcicella aurantiaca
  misc_feature 1..98: note = MG7-2
  source 1..98: mol_type = other RNA
ttcaactttacgtaagaacaatttgtaagcaattcacaataaaaggtttttaccgttgtgaaaacatattctggcggtaactttagttatcgcctttt

SEQ ID NO: 5505 - RNA, 103 nt, unidentified
  misc_feature 1..103: note = Description of Unknown: uncultivated organism with predicted taxonomy: Collinsella
  misc_feature 1..103: note = MG14-1 tracrRNA
  source 1..103: mol_type = other RNA
tcaccttggggaagggcgcggctccagacaaggggagccacttaagtggcttacccgtaaagtaacccccgttcaatcttcggattgggcggggcgaactttt

SEQ ID NO: 5506 - RNA, 100 nt, unidentified
  misc_feature 1..100: note = Description of Unknown: uncultivated organism with predicted taxonomy: Megasphaera
  misc_feature 1..100: note = MG15-1 tracrRNA
  source 1..100: mol_type = other RNA
attatatcttagcgagagatagtaggttattacaataaggtccaacaggagtgttggtaccgtaaagctctaacggcacccacgggtgccgttatctttt

SEQ ID NO: 5507 - RNA, 87 nt, unidentified
  misc_feature 1..87: note = Description of Unknown: uncultivated organism with predicted taxonomy: Bacteroidales
  misc_feature 1..87: note = MG16-2 tracrRNA
  source 1..87: mol_type = other RNA
ttgtgaattgcttaaattatgtactgcaaaaataaacaaatattattacgaaaaagtttttttaaaaatatttttttacataacttt

SEQ ID NO: 5508 - RNA, 83 nt, unidentified
  misc_feature 1..83: note = Description of Unknown: uncultivated organism with predicted taxonomy: Clostridiales
  misc_feature 1..83: note = MG18-1 tracrRNA
  source 1..83: mol_type = other RNA
ttgactaccataaggaattacactacgagttcaaatacaattttttcaaattgccctatagggccctcacagtgtgagatttt

SEQ ID NO: 5509 - RNA, 92 nt, unidentified
  misc_feature 1..92: note = Description of Unknown: uncultivated organism with predicted taxonomy: Firmicutes
  misc_feature 1..92: note = MG21-1 tracrRNA
  source 1..92: mol_type = other RNA
ttataccactacgagagaaaaagtgtgttactgcaataaggtaaaacaccacgaagctctgccctaactgccttagcagttagggcatcttt

SEQ ID NO: 5510 - RNA, 90 nt, unidentified
  misc_feature 1..90: note = Description of Unknown: uncultivated organism with predicted taxonomy: Bacteroidales
  misc_feature 1..90: note = MG22-1 tracrRNA
  source 1..90: mol_type = other RNA
ttgctaattgaaagcaattcgcaataaggattattccgttgtgaaaacatttcgagtggcttcgtgaaattcacgaagtcacttcgtttt

SEQ ID NO: 5511 - RNA, 82 nt, unidentified
  misc_feature 1..82: note = Description of Unknown: uncultivated organism with predicted taxonomy: Clostridia
  misc_feature 1..82: note = MG23-1 tracrRNA
  source 1..82: mol_type = other RNA
acttacaaggtgagtgcaaataaggtttaaccgaaattgtttacctgcattgtgcagtataagaaagaccgcgaggtctttt

SEQ ID NO: 5512-5537 - skipped (26 entries)

SEQ ID NO: 5538 - RNA, 72 nt, unidentified
  misc_feature 1..72: note = Description of Unknown: uncultivated organism
  misc_feature 1..72: note = MG2-4 putative tracrRNA
  source 1..72: mol_type = other RNA
tttgaatcaagatcaaagtaaacggccccgctccggaccctgcctggcactccggatgcgctagggtttttt

SEQ ID NO: 5539 - RNA, 110 nt, synthetic construct
  misc_feature 1..110: note = Description of Artificial Sequence: Synthetic polynucleotide
  misc_feature 1..110: note = MG3-8 putative sgRNA
  misc_difference 1..22: note = a, c, u, g, unknown or other
  source 1..110: mol_type = other RNA
nnnnnnnnnnnnnnnnnnnnnngttgagaatcgaaagattcttaataaggcatccttccgatgctgacttctcaccgtccggctcctcttaggaacgggcggtatgtttt

SEQ ID NO: 5540 - RNA, 143 nt, synthetic construct
  misc_feature 1..143: note = Description of Artificial Sequence: Synthetic polynucleotide
  misc_feature 1..143: note = MG16-2 putative sgRNA
  misc_difference 1..22: note = a, c, u, g, unknown or other
  source 1..143: mol_type = other RNA
nnnnnnnnnnnnnnnnnnnnnngttgtgaattgaaaaattcacaataaggattattccgttgtgaaaacatttaaagcggggtcaacagcctcgctttctttttgagtctatgagacattaggtcaataagtctatgagtttt

SEQ ID NO: 5541 - DNA, 122 bp, synthetic construct
  misc_feature 1..122: note = Description of Artificial Sequence: Synthetic polynucleotide
  misc_feature 1..122: note = MG16-2 putative sgRNA
  misc_difference 1..22: note = a, c, u, g, unknown or other
  source 1..122: mol_type = other DNA
nnnnnnnnnnnnnnnnnnnnnngttgtgaattgctttaaattgaaaaatttaagcaattcacaataaggattattccgttgtgaaaacatttaaagcggggtcaacagcctcgctttctttt

SEQ ID NO: 5542 - DNA, 103 bp, synthetic construct
  misc_feature 1..103: note = Description of Artificial Sequence: Synthetic polynucleotide
  misc_feature 1..103: note = MG16-2 putative sgRNA
  misc_difference 1..22: note = a, c, u, g, unknown or other
  source 1..103: mol_type = other DNA
nnnnnnnnnnnnnnnnnnnnnngttgtgaattgaaaaattcacaataaggattattccgttgtgaaaacatttaaagcggggtcaacagcctcgctttctttt

SEQ ID NO: 5543 - RNA, 22 nt, synthetic construct
  misc_feature 1..22: note = Description of Artificial Sequence: Synthetic oligonucleotide
  misc_feature 1..22: note = MG1-4 guide sequence 1 for targeting VEGFA
  source 1..22: mol_type = other RNA
aatatgtagctgtttgggaggt

SEQ ID NO: 5544 - RNA, 22 nt, synthetic construct
  misc_feature 1..22: note = Description of Artificial Sequence: Synthetic oligonucleotide
  misc_feature 1..22: note = MG1-4 guide sequence 2 for targeting VEGFA
  source 1..22: mol_type = other RNA
ctagggggcgctcggccaccac

SEQ ID NO: 5545 - RNA, 22 nt, synthetic construct
  misc_feature 1..22: note = Description of Artificial Sequence: Synthetic oligonucleotide
  misc_feature 1..22: note = MG1-4 guide sequence 3 for targeting VEGFA
  source 1..22: mol_type = other RNA
tggctaaagagggaatgggctt

SEQ ID NO: 5546 - RNA, 22 nt, synthetic construct
  misc_feature 1..22: note = Description of Artificial Sequence: Synthetic oligonucleotide
  misc_feature 1..22: note = MG1-4 guide sequence 4 for targeting VEGFA
  source 1..22: mol_type = other RNA
cacaccccggctctggctaaag

SEQ ID NO: 5547 - RNA, 22 nt, synthetic construct
  misc_feature 1..22: note = Description of Artificial Sequence: Synthetic oligonucleotide
  misc_feature 1..22: note = MG1-4 guide sequence 5 for targeting VEGFA
  source 1..22: mol_type = other RNA
tcggaggagccgtggtccgcgc

SEQ ID NO: 5548 - RNA, 22 nt, synthetic construct
  misc_feature 1..22: note = Description of Artificial Sequence: Synthetic oligonucleotide
  misc_feature 1..22: note = MG1-4 guide sequence 6 for targeting VEGFA
  source 1..22: mol_type = other RNA
gcggaccacggctcctccgaag

SEQ ID NO: 5549 - RNA, 22 nt, synthetic construct
  misc_feature 1..22: note = Description of Artificial Sequence: Synthetic oligonucleotide
  misc_feature 1..22: note = MG1-4 guide sequence 7 for targeting EMX1
  source 1..22: mol_type = other RNA
gtacaaacggcagaagctggag

SEQ ID NO: 5550 - RNA, 23 nt, synthetic construct
  misc_feature 1..23: note = Description of Artificial Sequence: Synthetic oligonucleotide
  misc_feature 1..23: note = MG1-4 guide sequence 8 for targeting EMX1
  source 1..23: mol_type = other RNA
gaggaagggcctgagtccgagca

SEQ ID NO: 5551 - RNA, 22 nt, synthetic construct
  misc_feature 1..22: note = Description of Artificial Sequence: Synthetic oligonucleotide
  misc_feature 1..22: note = MG1-4 guide sequence 9 for targeting Apolipoprotein
  source 1..22: mol_type = other RNA
aaggcaaacatcctgataatgg

SEQ ID NO: 5552 - RNA, 22 nt, synthetic construct
  misc_feature 1..22: note = Description of Artificial Sequence: Synthetic oligonucleotide
  misc_feature 1..22: note = MG1-6 guide sequence 1 for targeting VEGFA
  source 1..22: mol_type = other RNA
tctttagccagagccggggtgt

SEQ ID NO: 5553 - RNA, 22 nt, synthetic construct
  misc_feature 1..22: note = Description of Artificial Sequence: Synthetic oligonucleotide
  misc_feature 1..22: note = MG1-6 guide sequence 2 for targeting VEGFA
  source 1..22: mol_type = other RNA
tggaccccctatttctgacctc

SEQ ID NO: 5554 - RNA, 22 nt, synthetic construct
  misc_feature 1..22: note = Description of Artificial Sequence: Synthetic oligonucleotide
  misc_feature 1..22: note = MG1-6 guide sequence 3 for targeting EMX1
  source 1..22: mol_type = other RNA
atgggagcccttcttcttctgc

SEQ ID NO: 5555 - RNA, 22 nt, synthetic construct
  misc_feature 1..22: note = Description of Artificial Sequence: Synthetic oligonucleotide
  misc_feature 1..22: note = MG1-6 guide sequence 4 for targeting EMX1
  source 1..22: mol_type = other RNA
tgccacgaagcaggccaatggg

SEQ ID NO: 5556 - RNA, 22 nt, synthetic construct
  misc_feature 1..22: note = Description of Artificial Sequence: Synthetic oligonucleotide
  misc_feature 1..22: note = MG1-6 guide sequence 5 for targeting HBB-R01
  source 1..22: mol_type = other RNA
tggtgtctgtttgaggttgcta

SEQ ID NO: 5557 - RNA, 22 nt, synthetic construct
  misc_feature 1..22: note = Description of Artificial Sequence: Synthetic oligonucleotide
  misc_feature 1..22: note = MG1-6 guide sequence 6 for targeting HBB-R01
  source 1..22: mol_type = other RNA
gggcaggttggtatcaaggtta

SEQ ID NO: 5558 - RNA, 22 nt, synthetic construct
  misc_feature 1..22: note = Description of Artificial Sequence: Synthetic oligonucleotide
  misc_feature 1..22: note = MG1-6 guide sequence 7 for targeting FANCF
  source 1..22: mol_type = other RNA
aggtgctgacgtaggtagtgct

SEQ ID NO: 5559 - RNA, 22 nt, synthetic construct
  misc_feature 1..22: note = Description of Artificial Sequence: Synthetic oligonucleotide
  misc_feature 1..22: note = MG1-6 guide sequence 8 for targeting FANCF
  source 1..22: mol_type = other RNA
gccctacttccgctttcacctt

SEQ ID NO: 5560 - RNA, 22 nt, synthetic construct
  misc_feature 1..22: note = Description of Artificial Sequence: Synthetic oligonucleotide
  misc_feature 1..22: note = MG1-6 guide sequence 9 for targeting IVS40
  source 1..22: mol_type = other RNA
aatgtatgctggcttttaaggg

SEQ ID NO: 5561 - RNA, 22 nt, synthetic construct
  misc_feature 1..22: note = Description of Artificial Sequence: Synthetic oligonucleotide
  misc_feature 1..22: note = MG1-6 guide sequence 10 for targeting IVS40
  source 1..22: mol_type = other RNA
gctcctttggctagggaagtgt

SEQ ID NO: 5562 - RNA, 22 nt, synthetic construct
  misc_feature 1..22: note = Description of Artificial Sequence: Synthetic oligonucleotide
  misc_feature 1..22: note = MG3-7 guide sequence 1 for targeting VEGFA
  source 1..22: mol_type = other RNA
cccctatttctgacctcccaaa

SEQ ID NO: 5563 - RNA, 22 nt, synthetic construct
  misc_feature 1..22: note = Description of Artificial Sequence: Synthetic oligonucleotide
  misc_feature 1..22: note = MG3-7 guide sequence 2 for targeting EMX1
  source 1..22: mol_type = other RNA
tgtggttccagaaccggaggac

SEQ ID NO: 5564 - RNA, 22 nt, synthetic construct
  misc_feature 1..22: note = Description of Artificial Sequence: Synthetic oligonucleotide
  misc_feature 1..22: note = MG3-7 guide sequence 3 for targeting HBB-R01
  source 1..22: mol_type = other RNA
ggccctgggcaggttggtatca

SEQ ID NO: 5565 - RNA, 22 nt, synthetic construct
  misc_feature 1..22: note = Description of Artificial Sequence: Synthetic oligonucleotide
  misc_feature 1..22: note = MG3-7 guide sequence 4 for targeting HBB-R01
  source 1..22: mol_type = other RNA
tccttaaacctgtcttgtaacc

SEQ ID NO: 5566 - RNA, 22 nt, synthetic construct
  misc_feature 1..22: note = Description of Artificial Sequence: Synthetic oligonucleotide
  misc_feature 1..22: note = MG3-7 guide sequence 5 for targeting HBB-R01
  source 1..22: mol_type = other RNA
ctgactcctgaggagaagtctg

SEQ ID NO: 5567 - RNA, 22 nt, synthetic construct
  misc_feature 1..22: note = Description of Artificial Sequence: Synthetic oligonucleotide
  misc_feature 1..22: note = MG3-7 guide sequence 6 for targeting FANCF
  source 1..22: mol_type = other RNA
tccgagcttctggcggtctcaa

SEQ ID NO: 5568 - RNA, 22 nt, synthetic construct
  misc_feature 1..22: note = Description of Artificial Sequence: Synthetic oligonucleotide
  misc_feature 1..22: note = MG3-7 guide sequence 7 for targeting FANCF
  source 1..22: mol_type = other RNA
tatcatttcgcggatgttccaa

SEQ ID NO: 5569 - RNA, 22 nt, synthetic construct
  misc_feature 1..22: note = Description of Artificial Sequence: Synthetic oligonucleotide
  misc_feature 1..22: note = MG3-7 guide sequence 8 for targeting Apolipoprotein
  source 1..22: mol_type = other RNA
tcgggcagagggtgcatcacct

SEQ ID NO: 5570 - RNA, 22 nt, synthetic construct
  misc_feature 1..22: note = Description of Artificial Sequence: Synthetic oligonucleotide
  misc_feature 1..22: note = MG3-7 guide sequence 9 for targeting Fibrinogen
  source 1..22: mol_type = other RNA
ataataagcagaacttttagtg

SEQ ID NO: 5571 - RNA, 22 nt, synthetic construct
  misc_feature 1..22: note = Description of Artificial Sequence: Synthetic oligonucleotide
  misc_feature 1..22: note = MG3-7 guide sequence 10 for targeting Fibrinogen
  source 1..22: mol_type = other RNA
gttttctttagttattaatttc

SEQ ID NO: 5572 - DNA, 3075 bp, synthetic construct
  misc_feature 1..3075: note = Description of Artificial Sequence: Synthetic polynucleotide
  misc_feature 1..3075: note = MG1-4 sequence codon optimized for E. coli
  source 1..3075: mol_type = other DNA
atgaaaaagaaagttttcgcatttgatcttggtaaagcaagtattggttactgcgtccgtgacggatttaatatcaatgaagctaatagtattatcatcgataaagatcatgccgagaccatgtctctgcgtgaccgtcgccggattaaaaaaacactcgacgcccatcatgcacgtgaggaatacttcaacaaagtttggtcgggcgtaggcctcaacatcttagataaaaataacaacaacttcaaaaaagagtttccctctaaaaacgaggacgtaatctacacctcctgcttgctgcgcatcgcgctgctccagaatcaaaaattagaggagtggcagatttataaggcgctgtataatgctttccagcgtcgtggttacgatgttaatatcgcatggaagagcgttcaaacagacgacgacaaggaaaacatcgaacgcatgaaaaaatatacatgcgaaaacgatatcgaactgattatcagcgatgagtacaaatatccctgttactatgatgctttgcgtttgggcctgtggaacgaagatgaacccacgaaattgaaccgttcaattccacaacacaatagcaataaggtccgcactactgaatatgtcgcgccgcgcgaactcgtagaaaaggaactcaagcagctgtggttaaacgcgcagctgcaactgccccagttaaacagtatttcagccgaggaattcttatacggcgaatacaaaattccatatggtagctgcgtacaaaaggaattcaaacagtatcgtggcacaaaaaaagactggcaaggtgttctgtgtcagaagattccgcgcttcgataaccgcattattgctaagtgcaaactgctgccgaaacgcaacgtatgtaaagctaacactattgagaacgtaagtttcgtcctgctgatgaaacttaagaatcttcgcttcaccgtaatttccggtgaaaaattgcgtttgtcgccggtccagattaaacaaatttatgaaaactggcttgaaaaagtagaagatacgtataataaggacctggaaaaggccgaaaaattaggtaaagagaacccggaaaaacgcttgaatatcactattacccgccaggaaatcgagaaaatcattggggaaaaaattattgataagatcgaacccatgaaagcagatattagtggtcgctcgagtttttgtcgtcgtgcctgccaaatcatgaacaaaattatcctggacggcgaactctatccgcagaacgtggacattagtgagttcgtggaccgcgataacgcaaaaaatggcatcacggaagaggaaatccagtcaatgttatccaagattggtgactggaataacctgtatattccggataatcgcgaggaaaatgctcagaacgctagcaattcgcgtattaaaactgacattatgttaggcaacattaccaatccgattgtacgtaaccgcttgcagatctttcgtgatcttttgctgaacttggcggaaaaatacgggaccccggacgaagtcatttttgagttcgtgcgcgatggcgcagataactccctgtacggcagcaagaaggcacaggataccgaacgctttatgaaacagcaagagaaggaaaacgaacaaatcattaatgaactgaaagatgcgggcttatatgtcaacggtcaaaatcatgcaaatgccacgtacttcctgatgcacaaactcctgaaaagtcagggtggcaagtgtatctacagtggccaaaacatcagcccgtctaactatgacgaatgcgagattgatcatatttatcctcgtacgctgggaggcaacgacgctctctacaacaaagtggtttgttatcgtcgtgaaaaccaggacaaaaaaggccgcaccccgtatgaatggctgagtccggacagcgataaatgggctaattacgtcaatcgccttaacaagatcaagaaacagctggggaagaaaaaattcgaactgctgacctctaagccagaagattgtgaaaaactgatcgaaagttataacggtctcgcggagactagtcatattgcacgcgtagctcaacagatgactgctttcatctttggctggggtctgcagatccagggtgagagccggcgtattttcgtgaataacggctcttcgacctgtgccatccgcaaacgctatgggttaaacaaattactgggcgataacctgaaaaaaaatcgctctaacgataaacaccacgcccttgacgctatttgcatcagtttttctcgtgattttaaatatgacaaagaaattaaaaaagacatcattaagggtttcaatccggaaattgtcaagaacgcgatcgataaaatcatgccttatccctatgcaaatgataagccgtttaaaggtaacaccaaacccctggaaactatctacggtcttcgtacgtacggcgacaaaagttatattactcagcgcgttgaactgaactcgattgataaaaaagcgactaaaattaaatcgattatcgatgaaaccatcaagaatgacttgctgaataaactgaaggaaaacccgacagagcaggagtggaaactgatgctgcaaaattatattcatcctaaaaaacagactaaagtgaaaaaggtgatgatttctgtgtcagagggagagattactaaagatagcaacaatcgcgagcgcatgggcgaatttgttgactttggcacgaagggcactcagcatcagtttaaacattctaaacgccataagggccaaatcctgtattttaatgaaaaaggcgtcgtggaggtaatgccggtttattcgaatatcaaaaccacggacgtgaaagataaacttcagaatatggggtgtaaactgtataacaagggccagatgttctacagcggttgtctggttgatatcccaaaaccattcaaagcgggctcgaaggagtatcctgctggccgctaccaaatcaaaacgattcgcagtgataaagtggccgaactggaagacgcctgcggtaacaagatcagtacgaatgtgaaatacctggtacctgccgaatttaaaaaagtcgaaagcaaa

SEQ ID NO: 5573 - DNA, 3231 bp, synthetic construct
  misc_feature 1..3231: note = Description of Artificial Sequence: Synthetic polynucleotide
  misc_feature 1..3231: note = MG1-5 sequence codon optimized for E. coli
  source 1..3231: mol_type = other DNA
atgcacactaaagagacggtttggggatttgatattggtaagggatctttaggtgaggcggtccgcgtcggcaacgaatttaagcacgtacttagcatggagatcgatgctgacttcgcagagatcaagacggccgcggctacacgccgcgcatggcgtacgcgtgaggcccacaaggcccgtgagatgtggcttgaaaagtgcctgagtgacgcggacattgagatcttaggccgtcgtaaagtggatatcgtggacggcacctggaagctggtttcccgtggtgacggccgtttagagcgcgagtttccggcggatggcgagaatgtatgctacaattctattgcgttgcgttgtaagcttctcctgggtgagaagctggagtcctggcaggtctttaaagctttaaattcagcaattcagaatcgcggatacgacgcgcaaatcccatggggcgacgaagacggaaagtcgtccgaaacaaagcgttccggcaagtccgattccgccaagaagtcgggcgaggatgaaagttatgcagagcgtctggcattgtttgaacgtgagttcgacaagctgttggcggaagtagaaaatcgtgagaagtatgacttcccgtgtttcttcaaggcagcgaagatgggactttggtcaccagagaaccctgacaaggtcggcatccgtattgataataccgcggagaaggcaaagggatatgtggtgccccgcaatgcggttatcgcggagtttcgcgcgcttgttaatgctgccgcaaaacaatacccgaagttgaagggaaaggccgattttatcatgttcggaaaggccgaagaagcatacgcctcgtacaagcctgaattacgtcgcaagtttggcctgcgccgcggcgctgattcagactggactgctctcggtcagaaaacaccccgcttcgacaaccgcattatcgggaagtgtaagcttatcccgcgtctgaatgtctgcaagatcaaacctctgaaggagtgtaaggccgaggatgatttcttaccgcatacgatcacgctggccttgaagctgcttaatcttcgcttcttccgtggcgccggcatcgactcgttatcgttcgacgagtttcttcgcgcctttgaaattgcccgccaaaataagtttgccctgaacaagacgaatctcaagaagttcttcaagactatcggagcggagattatggacgagaatcaatccagtgtggaacagccccgcgagggtgggcgtgccagctacagtcgtccagcgatgcgccttctccgcgatctgatcttcagtgggaagtccccggctgagttctacgcatcccgtatttgcaagattgagaataccgataagaatcgcggactggttgcggaagacttggcgttcattaaattgatgggtgatattccctggaacggtatctttgttccagacgttgacacattcaattttgcgaatattcgcgagtccgagcgtgcagataagatcaacaagctgattggcagccaaaatgacccaatcgtgcgccaccgtctggcattcttctatgagcgcattaagctgcttgaatctaaattcggagcacccgacaagatcgtgttagagtttgttcgtgacgacttcttagggtctaaggcaaagaaagagatgtcgcagggtatcaagaagcgtttcgaggaaaagaagaaacttgcagaggagttagacagtcagcgtgccgagtttggtaacaaatacgcgtccaagaagatgcttttaaagtttgagctgtataagaagcaacgcggacgttgcgtgtacacggacaatgcgttgccgctgtctgaacttgagaacttagaggttgaacacattttcccgcgcagccgcggcggcgccgacgcaatgtacaactatgtccttactgacgagaacactaacaagcagaaaggggacaagaccccgtttgagtggttaagcagcgacaagacaaaatgggaatcttactgtgatcgcgtgcgtagtttaacccagagcctgggcgccaaacgctgcaagttgcttgtaagtccaaatgcagaagagctcatgcagaaatacacagcgctcgccgagactgcctggatctccaagctggcgcaaaagatttgctgtatccacttcggctttcagtttggcggcttaaagggtgagaagaaggtctggactgtgagcggaaataccacggccatgattcgtggccgttacggtttaaaccgccttctgcataatgaagagatcagtgaggacctgccgctgttagatcgcatcgtaaaggaaaagaacttcgaggaaaagaatcgtgataataagaagcaccacgcgttagacgctatgtgtatctgtttcgcgcctacgagcaatgcgaagaaagcgctctcacgtaagaacatcttgcccgaggaaattgcaaagaaccccgaatccgacgacgcccgtaatttcttcgcgaagtatctggccgaggttgttcccactaaggtggcgattaagaagccggagctggagcaaacaatctactccaagcgtgtaatcggtggccgtcaaactattgtgaagaagtgtaacgtgcgcgatcttgcttacaagggtcaaaacccaaagtacgacttcgacacgcttacgaagcgcatcaaggatatcatcaatccggttagcaagcgcgtcattgaagattttgcgaagaccgaaccaaccgaggcggagtgggaagattggtgtaagtacgaagcggcaatcccaagtaagaatggttctccgacgcgcttgcttcgtgtattatgcaagacgaaggacgatgccgagcgttttaaggatttgtcaaaggatggctgcggtgcgtatcgtaagtccaagtcgcacaaaggccagtttatctggaaggataacaagggcaattatctcgttgctccggtttacatttacagcagcaagcagaaggtgtatgcggaactcaagaataaccctaagtgtatgggcatttgcgatttcttcaagacgggctgcctggtgaagatcagcaacgaggtggttgacgagaagaagaatcgtctctggttaaaggcgggcttttacaacctcaacagcatcgccaaggagaagcgtgtgtatcttaccgatgtaaacggccaggagcacaagaagattccgctgcaacatttgatgaacgcaggaatgaagcgtgtcgagacgaatacaatc

SEQ ID NO: 5574 - DNA, 3177 bp, synthetic construct
  misc_feature 1..3177: note = Description of Artificial Sequence: Synthetic polynucleotide
  misc_feature 1..3177: note = MG1-6 sequence codon optimized for E. coli
  source 1..3177: mol_type = other DNA
atggagaaagaaaagaacaaccatgtttggggctttgatattggcaaagggtctctgggtgaagcagttcgggttggtggcgattttaagcatattgcctcagttctgcttgacccggaatttggggaaatcaaaactgcggccctggctcgccgtcagatgcgcacacggaaagcccataaagctcgcgagaaatggctcgaggagtgtctcgacggcaccggtgtggagattctcaaacgccgcgaagtgggaattgttgatgggcagtggcgccttatctcgaaaggtgatgaacgcctggaacgcgaatttccgccgaacggcgaggaagtgtgctacaactctattgccctgcgttgtaaattattgctgggcgagaaattggaagggtggcaggtctttaaagccctgaacagcgctattcagaaacgcggatacgatgagaatatcccttggggggaagccgaggaaaagtccagcaaaaaggacgaagatgattacgcgcagaaattaagccaatacgagcgtgaaaaatctgaactgtttgaaagttttgctgatggggaaaaatacgactttccttgctttttcaaagcatataaaatgggtctgtggagtccggaaaacccgcgtcgcgtcgaggtccgcattgattgtcgtgcgcaaaaagcaaaatcgtacgtggttgcacgcaaatatgtagaacgcgaatttgaatgtctggtggaagcggccgcgaaattttttccgaaactgaaaggccgcgcgaaattcatcctgtacggcgtctctgagaccccgtacgcatcttactatggtaacatgcgcaagaaatttggcctgaaacgcggagcggagagcgattggaccgctcttggccaaaaagtcccgcgttttgataaccgtattatcgataaatgtcgcttaatccctcgcatgaatgtctgtaaaatccgcccactgaacgaagctcgcaacgaaaaggacctgctgtattatgaggtgaccctggcattgaaacttcttaacttgcgtttctttcgcaactcgaacatcgaacagctgaccttcgaggaatttaaaaaggcctttgaaatcgcgtctggcgccaaatacaaaatgactaaaacggcaatgaaaaaatttctcaaatctatcagcgccaccgcgttaggtgacgattatgcagaaatcgaaccgcctaaggagtctgggcgtgcttcgttttctcgtccagccatggatattttgaaagaactgatttttagcggaatgccgccgcgtgagttttacggccgcaaaatccctgagatctcgaacacggacaagaacaaaggggttgttgcctctgatctggactttatcaaacttatgggcgactgcccatggggcgggatttttatcccagacgtacagacctatcagtttgcgaatgcggcgttcccgaaccctgatgcacagatcaataaactgattggtagtcagaacaaccctatcgttcggcaccgtctgaccttctttttcgaacgcatcaaatttcttgaaagcaaatatggcgtgccagataaagttgtgctggagttcgtgcgtgacgattttatgggagaaaaagaaaaaaaagaaatgcgtatcgctatgaaaaaacgcgctgaagaaaaaatgatgatcgccaaggacctcgacgagcacggtttcaaaggcggcaatctgctgcttaaaatggaattgtatcgcaaacagaatggcatttgcttgtacaccggcgacgcgctgcccctttcagagctcgcgactcttgaaattgagcatattgtgccgcgttcccgcggcggtccggatgcacaatacaactatgtaattacccgtgaaaaaaccaataaattgaaaggggataaaaccccatatgaatggctgtcctcggacgccaaggagtgggcctcatataccgatcgtgtgaacgcgtgcgcgaaagctctgggcaaaaaacgttgtcgtctgttgctggagaaagacgcagaggaattagtcgagaaatacaccgcgctggcggaaacggcccatatcgctaaactggcccaaaaaatcgtctgcatgcatttcggtttccaatttggcggtttgtccggcacgaagcgcgtatttacggtccctggggccctgaccagccggattcgcaaattctacggtctcgatcgcattctgcacaacgcggcagcggaaagtgaaaatctcagctttgaagaattcttgaaatttagtgaagatctggagaagaaaaaccgcaaaaataaaaaacaccacgccctggatgcgatgtgtctgtgttttgctccaaccggggtggacagccggcgcgcgaaactgggggaaattttaccggaaaagctgcgtagtgaaaaagcagcccgcgagttcttcaagtcttaccttgataaaatcatgccggtcgatgtggctcccaaaaaaccccgtttggaggacggcatctatagtaaacgcattattgggggtaaagcctgcatggtgaagcgtaacaacttggttgatctggcttataaaagcggcctgaaaccggtgttcgacatcccgacgctgatcaaattagttgacaaaaaggaaaagggcattattaatccgcagattcgtaaaatgattggcgaatttgctgccaccaatccggacgaatcagcgtggcgtaaatggtgcgaagaggtacgtcttccgagcaaatctggcctgggtgcccgcgttttacgcgtcctggtgtactacggcgaagccgatgaatataaggatctgagtaaggatggctgtggtgcttatcggaaaggcgacggccataaaggccaggtggtgtgggaaagtgtggatggaaaatattacgttgaaccggtctatgtacacgcttcgaaagcgggagttatggcggccttgaatgcgaacccgaagaaaaaacgcatctgcggtatgtttaattcccattgcaccgttgatgtcggcgatgtgtacaacgatcgcggcgattttattcttccagccggccgctacatggtcaataccatcctgacgaccgggcggtgtgtcttgaccaacgccgacggtgaaaaacgcaacccgatcaacattaactacctgatgcgcgctggtatgcgccgcgtcgagttaagtgaactg

SEQ ID NO: 5575 - DNA, 3183 bp, synthetic construct
  misc_feature 1..3183: note = Description of Artificial Sequence: Synthetic polynucleotide
  misc_feature 1..3183: note = MG1-7 sequence codon optimized for E. coli
  source 1..3183: mol_type = other DNA
atgaaggtgatggaagacgagggtggcaatcacatctggggctttgacatcgggaaaggttcgctgggcgaagcggtgctggacggctcagaattcaaacacgtggcgagcctgctcctggacgctgactttggagaaattgagacagccgccggattacgccgtcaaatgcgcacacgcaaagcacacaaggctcgtgagaagtggcttgagtcctgtctgagcggttttggtattgaaacattgaagcgtcgtgaggtcggcatcgttaatggccagtggaccctcatttcgaaaggggatgagcgcctggaacgtgagtttccaccagatggtgagaacatttgttacaacagtattgctctccgctgcaagttgttactgggcgaaaagctggaagggtggcaaatctttaaagcactcaacagcgcgatccagaatcgtggctatgatgagaacatcccgtggaaggaaagcgatgctagtccgtcgaagaaagaaggcggggactatgcgcagaaactgtcacaatactctcgtgaaaagtccgagcttttcgaatctttcgagggtggtgagaagtatgattacccctgtttctttaaagcgtataaaatgggcctgtggagccctgacaacccagaacgtgttgaagtccgtattggatccgatgcacagaaagcaaaagattacgttatcccgcgtaaggatgttgagcgcgaattcgagcgcctggtggaagccgcctcgaagtggtaccctgccatgaagggcaaagcgatgtacatcatgtatggtatcgccgagaccccatatgctagctacaagcccctgctgcgtaagaaattcgatttgaagcgtggggcagagtctgattggaccgctctgggtcagaagattccacgcttcgataaccgcatcattgataagtgtcgtcttatccctcgtcttaatgtgtgtaaaattcgcccactgtccaagattcgcggggaagccgacctgttacactatgaaatcacattatcgctgaagctcctgaacctgcgtttctttcgcaactcgaacgtggagtcactgagcttcggagagtttaaagcagcattcgagattgccaagggagccaagtataaaatgggaaaagccgccttaaagaaattcctgaagagcatctccgccagtgtcttatctgaagatcaatctgagattgaggcgccacgtgaatcgggtcgtgcagccttcagccgtccggcgatgctgctgctgaaggaactgattttctctggtatgaccccagcggaattctatgcaaagaaaagcggagagatcagcaacgcggaccctaataaaggaatcgtagcctcagacttagacttcatcaaactcatgggtaactgtggctggagtggcatcttcatccctgatgtagatacatttcacttcgccaataagggagcagaaccagcgaagttgatcaatgaactgattggcagccaaaataacccaattgttcgtcatcgcctgagcttcttttatgaacgtattaaattcctggagagtaagtttggcatcccggataaagtagtattagaattcgttcgtgaggattttatgggtaaggaacagaagaagcgtatgcagattgagatgaagaaacgtgcttctgaaaagatgttgatcgccaagaaattagatgaagccggctataaaggtgggaaccttcttctcaagatggaactgttggagaagcaaggcggtgtctgtttgtacacgggtgaaccgcttttgccttccgaactcggtgtgctggagattgaacacattgtaccacgttctcgcggcgggcctgatgctcagtataattacgtccttacacgtgaaaagacgaataaagagaaagcagatcgcactccattcgagtggctgtcttcagacccggtcaagtgggctggttacagcgatcgtgtgaaagcccgtgctggtcaactggggcgcaaacgttgtgagctgttgttagagaagaatgcggaagagttggtagagaagtacactgccttagctgaaactgcccacatctcgaagctggctcagaagattgtgtgtcttcactttgggtttcagtttggcggcctgagtggcacaaaacgtgtctttacggtccctggagcattaactgcacgcatccgtacgttttatggcctgaacaagatcttacataatgaagacttggcccacgaaacactgagcttcgagggcttcctgaaacgtggtgaagagttagataagaagaatcgcgcaaacaagaagcatcacgccttggatgctatgtgtttgtgcttcgctcctacaggggtaaatagcaaacgtgcccgtgtggacatgctcctgccaccaaagatccgtagcgagaaagaagcggaacttttctttcgtaaatacttagataaactcatcccagtggatgtcgcaccaaagaaacccaagctggaagatggtatttactccatgcgtacagttggtgggaagaaaatcatggcccgccgtgtaaacctggttgacctggcatacaagagcggcctgaagccggtgtacgacgtatcggtcctgatcaaacttcttgataagaaagagcgcggcatcattaatcctcagatccgtaaactggtagcagactttgcccgtaccaacccaagcgaagatgagtggaagaaatggtgtggtgagtgccgtttacctagcaagaatggtctgggcacccgtgtaattcgcgtgctgctgaactatggtgagccggcggagtataaagacctgagcaaggatggccgtggtgcatttcgccgcggtgatggtcacaagggccaaattgtgtgggagtccaccgatggcaagtactgtgttctcccaatctatgtgcatgcaagcaaggccaaattattagcagaactctgtgcaaacccgaagaagaagcgcatttgtggtattttcaccagtcattgcatggtcaaggtgggtaacacctacaacaataaaggtgagttactgctgccggaaggagtttacatgcttaacaccattcgtacggatggatggatccagctgacgtctgccaatggtgacaagtcaaaaccaattaatattaactacctcatgaaggcgggtatgaagaaggtccctgtgaaggattta

SEQ ID NO: 5576 - DNA, 3999 bp, synthetic construct
  misc_feature 1..3999: note = Description of Artificial Sequence: Synthetic polynucleotide
  misc_feature 1..3999: note = MG2-1 sequence codon optimized for E. coli
  source 1..3999: mol_type = other DNA
atgccaaccaccaacccctatgtaatcacacacgtgacgaagaattggatgaaggatgagttttacgattcagctcttgtcctcggtttggatattggaattgaaggcatcggcgtttggttgcggaaaggccgcgaaccgctttttgcccgtacattcatggtttcgctcccggaagcggctccgctgaagaatcggcgcgccaaacgagcacaacgacacgcccggcagagcctccgtcgtcgtgaggccatgttgcgcgagtgggttgttcgctacggcttgcttccccaggaaaaaactgacggacggtggtggaagaaccctgccgtttttgagcgggccttcgagcatcgtcatcgagcgattaccaccggggtagccagtcctgaatgtttagtcgtatgcatccgtcacctcttgcggcatcgcggttttgattatcacctgaccgacgagggggctttcccgtggggtgatgaattggatgataaggaaatcatccagtgggccaagaactcgtgttgcgcaccggagtatcgcactcatttgtgcaatttgatcgaggccgacgctgcttgggcgaaaaactccgatggctcatttacggaaaagtatctcaaagtgcgacaggcactggatgatgccgtgagggaatacgagaaccgaccggtcgagcggatgttggaacagcatatgagcgagaagaatcatccgcatctgcggcctcgcgcccgtggacgcaatttcgcccgtgagcttgttaagcagcacttatatgccatttgcgagaaacatcgccacttttttgcgcccggcactttcgaccaagcgatgcgggaattgctgggtgaccagacaggaccaagtcagtggaaactgacgtggatggatcaagacggcaaggcccgacaaacgatcctcgattatcaccggcgcacacgggaagaggccgaagagctttggaagcgcaaagtcaaaaaatgcccgtttgctccattgctgtttgaaaagcggcatccgacgactccacaacacgactgcgctgtccgtagcgacccacgaatccgtcgtttcaacctactgatgttcttagctgaacgacggatcgaactggagacccacgacgcggaaggacgactccaaaatccgcgcgtgaatcttgatgccaacgtcgtccgcgatttgttgggcgatttggagcaagatattcgggcggtcgaagccttgcgaaacaagcagtcagcgtcccgaccagacaaaccggggaagaagacctttgaacagcgatggcgcatctgtaacgactgcggcaaggagactggacaagatgagacgggcaagagttcctgttgcaaagctaagacaaaacccaaaatgccgctcgctggggtcgctaaggggtcgttcaatgctgactttttcgatcagttgggtgacttgttgcgacccgaattgcgttccttgaagggacgggcgagcctgtccggcgaggcggcggaagtgctgttcaagctcgttaccagaaacggtacagacttcgagcctgctagaattcgccaagcgttggaagactgcggctactacgattggcgtaccaatctgccggccggccttggcatctatccgcaagtgacgttcttgttaggaaatcgcggtcattacgacaaggacggcaaccccaggcagatcgacaagacgacaggcaaccccgtacatcacggcatcctgcgccggctgtttgcgggccagttgcgtctcgacgatgggacattggtgggtctgaaggataaactcgacgataaggttgtgcccgattacgtggtcatcgaaaccattggcgagattccgaaaaaccagaaggaaaagaaggagtttcaagacgaaatcaaagccaaccggtcacgaaaaaccgacatcatcgagaagaaatacggtctgaaactcgattcgctttctgactggcaggtgaaacaagtgttgctgttcgaccagcaagccaatgaggaaggcgaagcgttcagcccctacagcggcgtgtccctcggcacaaacccgctggcgcatgatttggaggtggagcacatctaccccgaacgacgcggcggtatcagcgtcatggacaatttggttatcacatggcgcacagaaaaccaaaccaagggagaccgaactccttgggagtgggcaaaagacgagggttggcgggtggacgtccatttgcagaagatgcactggagtgcgaacaagcgcgctctatttgtccgccaagaaagcgatccgccgcagtgggacaacaccacacggatggcccaacttgctcggcatctccgcgccgaggtcatccactggcttggtttagaccagatccaagatcaaaaggagcgtaacaaggaaatcgcccgccgcatcgggacgccgaccggcttccaaaccagcgtttgccgcgagtcgtggacaccaccccatgtgtttccccaaatgtatcggttgctctgcgacaagaagggagtcccggtgcgcgacaggaatggacaagagcgatgggtcaaagaccgcaccaatttgcgacatcacctctgggatgccgctgtgctttcgcatattccaccaggtgtggggctgaattccgccgattgcggcggcattttcgtccaccgtcgcgacccgcagaatggcgaatggtcggtttcggcgttagcggatcttggccctgacctggtggcgtttgaaaaggccaatgccgaccgttgtttagtggtgcgcctgcgccaacgcaaatccaaaaagtcccgttacaaagaaaccatcttcagcctgccggatcaacagaacagggtctttgcacgcgaaccattgagcaaggtcgtcacatctctcttaaagagcaagaagaagaacccggatgcagaattgcggaagctattggaccggccggggcttctcaaccccctcgaaatcacaaacaaaaagacaggccaaacgaaacaaatcaagttgctgaacaaggccgacgtagaacgttggttatcctgcaaagacgtctcactggatcaagaaggattccgcaaattcatcgaggatgtgggcgtgccgacggagcaaatcccagacgacgcggtgaaagcggcgttcatgaagagaaatggcgagacgttacttcgcaagacgttcaagcccaactcccttgtaagttttattcgacagaaatgtcgcatcaaagattcagaaatcgaggcccgtgtggaaatagctatcgccgaacgaaatgaacgcaccgtcctgcgggcggctaacggacgagacggacagcccggtcaagtcatccgcagcattcttatcgagcaagacaagttgccgccatgcggttttggcctacatttcaatcccactgccaaacccaaacgcgggagcgaagtcgctgggttcaagcctgtggacaatagtaattccgttgtctatctgcgccgcgaaatctggatcggccaacgcaccaaaaagaaaggcagaaaaacaaccgtggagaccttctacaagtcgcgcctcatcccacatccacgtcacctcgcttcgtaccagaaacttcacggccagccgtggaaagccgacccgttaccgctaggaatgaaactggccggcaagctggccgttggtgacctgctccgtattccgttgaaaaaagaaaaacgaaatcgcaacgacaatttgatcgcgaagcgcggtgaaaccccgctggagtcgaggttctaccgggtcaagtcaatgaagaccaacggcacgatcgaattccaaatggccgagtttgctgaaccaaagttggtaaaagggcaaatccccgatccggccacggaacggttattggaaacctacgagttgacgtgcagcaacgaggccgatttgctctggttgctggaagtcacgacaggcaagagaatcaaacttccaccgccggtcgtggaaaacgctccgaccactgggaaacgggagggcgaacttctg

SEQ ID NO: 5577 - DNA, 3240 bp, synthetic construct
  misc_feature 1..3240: note = Description of Artificial Sequence: Synthetic polynucleotide
  misc_feature 1..3240: note = MG2-7 sequence codon optimized for E. coli
  source 1..3240: mol_type = other DNA
atgaagcaaggtcagattgcgttcagttttgacattgggcattcatcaatcggttgggcagcgttccaagtgagtgatgcaccgggtacctttcacagtctgctgggtaccggggtagtgttattccctaaagacgcatgtttggccagcgcacgtcgtgggtttcgtcgtagtcgtcgtaatattgcggcacgtcgtagccgcatcgatcgtcttaagaattatctcgcaggccttggtgttctgtcgcgtgatcaattggacgcgaatagcaattcctacccatggttgttggcggctcgcatccttgcgtcggacggtaagaaaaccttaacctgggaagagctgtggagcgtactgcgttggtacgcacataatcgtggatacgatggtaacgcactgtgggccggagacgatgccgacgcgggagacaaggaagatactgacaaagtaaagaatagcattgcacttatggagaagcataagacggcaacaatggctgagacggtgtgtaaagcgttaggccttgatcccatgggagaggttaaagcatctcgtatttactttaaaggtaataacgcagcgtttccacgtggtgttgtaactgaagaggttcgtcgtatccttgcggcacacgctggtaagctcccgaaagttgacgacgcactgtccgacatcttactgcgtaacgcggctacaagtggactggaacttccggcgcgcttcaagggtggtttgcttttcggtcagtatgtgcctcgcttcgataatcgtattatcccggcatgtcgtattaccggcaagaatacgccattaaagcgttgtccagaatatctcctttatcgttggggtcgtcttttaaataatctcactgtctttggtgccgatggtcaaattcgtactttattaccggcggaacgtcaggcgctgcatagccgtatggaagcggatgggttctttacaaagcgtacgttgaacgcggctttaaaggatgttaccggctgcacaccagcgaacacggagtccttcttcttaaccgaggagatggaagaagccttagtgttagatccggtgaagaagcttttggccactaatcaaattatgaaagacctgtggccgcagttatcggcagagtctcgtgagaaagctcagagtagtttaagcgctggtaagaaaattcgcttgggtgacatccttgctgagatggagaccgcaggccaagatactacggcggcgtcggatgcgcttgcgtcgcatcaaaagaaggctaagaagaagaatgcggacctggcgactcgtcgtctgagcgcggactacccgaagggccgcgcggcatattgtcgcgagattctggcgaaaacgtttgatgagtccattagcggaaaggattcgaccaaagagggcgggtgtttatatgagacggaagagattcgtaatcgtctcctgcgcgagcctctcgtgcaacaaacaaacaatcatctggttcgccaccgcctgttggtctttgagcgtctgctggcacatatggtagaagaattcgcgggtggagatgagaagcgtatcgcggctactgttgttgaggtagtccgtgagttgcaagagtttagcggtttaaatagcaaggagattacccacaagttaaacgagaagctcggtaactttcgctctgtggtaaagaatctcgaagaggctatcgcaaatagtgaagagcgcgtggcaatcactggatcactcattcgtaaggcgcgtattctcgaagatcaaggattcgtgtgtccgtacaccgggacccacttaagttataatcacttgcttgccgatcgtctggagattgaacatattatcccgcgttcgttgcgcccgtcggatgctcttagcagttgtgttatgacgtttcgtagcgtaaacgatatgaaaggtcaacgtacggctatgcagtttatttgtgaggaacaaggccgtgaagtgcctggtcatgagaatattcagattaccacgaagaaagcgtatgttgactacgtagcgaaacataagaagcagtatccacagaagagtgatgaccgtcgtcgttgtgagcgtcgcgccgagttgatgttaatggaacgttacgatcaacgtaatgcggattttacagaacgtgatcttacacagactagccatctcaataagatggctattcgtcttgtgaagcaacgtattgggattgatgcgaagcatttaccgggtaatgtgacggcatttattcgtcagaagctgcacatcgatgagtgtttatttaacgcggtgccgcgcttacagacggcggcaaaaggtcagccaaaatccagtaagcgcaagaagaaggcagaagaggctccggtggaacctattcaggatgatatgccgccgcgtaaattaacgaaagcggatattcgtgaattgacttatctccaccatgcgatggacgcagtgacgcagggattagctttgttattatttgcaccggaagattggccgctcttggtaaagcgtaatcttccggacagcgagcagcgtcatctgaaggcccgctacccattcttggacttttcggcagacaaacatattagtattcaggatttaccggaagatactctgcatactatttcggaacgtcttgctgagtgtcgcgtggttcgtcatatcccggcgaagatgcatggtattattgttgatcaaacaacgtggggcacggttgcggctggggctattaccaccctgcgccaaaagactactgaaaagaatgcgcgctgtgacgagaatggtaaacgctttattaaaactacagagaagaagcgtagtctgctgctgggcggtcctgatgcgccagatggcaaacttgcaaagatcaagggtgccattttagttaccgagaattggggttgtgcgctggatccgagcccgacggtaattccgcactttaaagtctaccctcaactgcgtgcattgcgtgaaaagaatggtggtcgtccgattcgcattttacgtaagggctcattaatccaagtgaaagccggcacgtaccagggtatttggagcgttgcaagtattaaagacaacgcagacggtatctgtctggacattaacgccgccgataaagtgaagttagaaaaccgttcagacgacagcaagattaacgttcgcctcgatagcctgcgcaagtctggcctcaaaatcttgaagcccaaactcacaggcgcctgcccgacgacaagcagcccg

SEQ ID NO: 5578 - DNA, 3402 bp, synthetic construct
  misc_feature 1..3402: note = Description of Artificial Sequence: Synthetic polynucleotide
  misc_feature 1..3402: note = MG3-2 sequence codon optimized for E. coli
  source 1..3402: mol_type = other DNA
atgtgcattaacggtgactcgatggccgcagttagcggctttagcccgtgcaagttcgggatcgggatcgacgtgggtgatcgttcggtgggttttgcgactatcgaattcgacgacgacggttttccgctctcggtcttagccagcgtcagttacaaacacgatggcggcctggatcctacgaagaataagaacccgattagccgcaaggcgactgcaggtgttgcgcaccgcgtgcgtcgcatgcgtaaacgccgtcgtcgccgcctggaaatgctggatgtgaagttacgctctctgggcttccctgtcccgaatggcgaggagccgcaaacttaccaagcatggcaaagtcgtgcaaaattaatcgatggccgcgtggacgaagtacgtgaactgaacgaccacctggtacgtgccgtgcgtcacatcgcgcgccatcgtggctggcgtaacccttggtggcgttttccgcaactgcttgaggcctcagaaaaccccagcgacgcgctggtagcgatgcgtcgtgaagcggctcaacgctggccaggccaggcgttagaaagcgccacaatcggtcagctgggttggcttggtgcacacccggatgttttggttcgcccgcgctcggcacgttcggaagttcccgtacttagctcccgtgtcatgcaacaggatcagtgtgcagaaatccgtcgctactggcaactgcaggatctccctcaggaagccctgcatcctatcctgaaagcggtctttcatcaggaaccgccgacggtacctgcggaacgtatcggccgcgacgccttaccggggcaagatgcaccgcgtgcgattcgcgcagcacttgaattccaagaatatcgtattcgtgacgcggtggccaacttgcgtgttcgcaccggcggcgcaaaccgcaaacgcaaactgactccggaagagaaccatgcggtagttaaatacctgatggaatttcgccaaaatccaagcccgtcttgggccgaggtagccgaacatattgacatcgcaccgactagcctgatcgcacctatcattgacgatatgcgcatcgcagcagctccaaccgaccgtagcaccatcaccgccgaagcggtactcagcaatatgaagaaagactcgggcgcccgtttatggtgggaatctgccgaccagaaaatgcgcagcttgttaatccgcttcctggccgacacgtccgactatactcaaccagaggcagagatggcaggtctggtagacatcgtgagcacctggccggattccgaaattgaaaagctgagtagtgcatcatggcaatcgggacgtgccgcgtattccttgcaaagcctggaacgtatgaatgcgtacatggcggagtacagcacgggagcgcacgaagcccgcaagggtgtgttcggagtagatgatagttggaaacccgaggcggatccttgggacgcccagaccgggcagcccgtggtggatcgtgtaatgacgatcgtacgccgcttcgtaggtgcgtgcgagcgtaaatggggcgaaccggagcgtattgtaattgagcacgtacgcacgggtttaatgggtcctgcccagcgtgcagaagtactgcgcgaaatggcaagcgggcgccgtaagaacgatcgcatccgccaagagcttcgtacctcaggtatcgatgagccaaatttgtcggacgttaaacgtcaccgcaagatccaaatgcagggcggcgtgtgtttgtactgtggaaccgacatcacaagcgccactgcggaactggatcacattgtcccgcgcgcgggcggcggaaactcgacgtctaccaatttagtagcagtttgtcgtgtatgcaatgctgcaaagggccgccgcacctttcccgaattcgcaagcagcgacacccgcgacgccgtatcgcttgaagcggcggtagagcgtgtgaaactgtggatcgacgataaaggtattaagaatattggcgaatcacgttatgctcgcgatgtcatccgtcgtctgaaacagtcgacacaagatgaacctatcgatgaacgttcacttagtgcgactgccttcgctgcggttgaaattcgtcgcaaattagaaaaccactttaaagaccgtacaaagccggtgcgtgtggatgtttaccgcggcgcccttacgcgtgaatcgcgccgtgcaggccgcattgacgcgaagatccgtttgcgtggcaacatcgacaaagatcgcctggatatccgccatcatgcgattgacgcggcagttctgacattactggatccatccgtcgcaaagaccctggctatgcgtttagacctgaaacgcgaacagcaggacagcggtcgtgacacgcgttggaaggagtttaagggcttaacaccagcgagccaagaacgttttatcaaatggtgccaagcctcggagtgccttgctgacatgttacgccaacaaatcgaggccgatcgcgttccggtcgtcgtgccattacgtattagcccgagtaatggtgcggtacacgatgattcggtgcgtcccttgacgcgccaaaagattgactcgacttgggaccgtaaatcaatcaaccgcattgttgatccggagattcatgtcgcgatgcgccgcttgcttaacaatgggaccagtctgcccgaggacaagaaccgcgttttggacttacctgacggcaacgagcttggtccgcatgacgaagtcgaacttttcagtacttccgccgcctcaattaagttacgtcgcggcggaagtgcggaaattggcggtagcattcaccacgcccgtgtgtacgcgtggatgggtgctaaaggccaacttgagtatggcatgatgcgtgttttcggtgccgaattccccacgctgactaaattatccggatcaaaagatattctgcgtatgcccatccacgccggtagtatgtcatatcgtgacatgcaagaccgtgtccgcaaacctatcgagagcgatatcgctgtcgagttgggctggattacgcagggtgacgaattggaaattttacctgaagcacacctggaaaccgccggtggcctgggtgactttctcaaaagtttcccggaaacccaatggaccatcgatggcttcaacgacccgagccgtctgcgcgtacgcccgcgtctcatgagtctcgagggacgcgatacaattgatgcgatgggccatctgagtgatacggaaaagctgaaaattaaacaagctctgagcaagggccttatggtgtcagcaagtgagttgttatcgcatggtgctaagattatccgtcgcgatcaccttggccgtccacgttggcgcggtaacgcgcgtccggtcagcattgaattagagcaggtggccaatcaattagtaaaccatcgtagcgtcgacggccaa

SEQ ID NO: 5579 - DNA, 3396 bp, synthetic construct
  misc_feature 1..3396: note = Description of Artificial Sequence: Synthetic polynucleotide
  misc_feature 1..3396: note = MG3-3 sequence codon optimized for E. coli
  source 1..3396: mol_type = other DNA
atgtcagccgactcattgaactatcgcatcggcgtagatgtcggtgatcgttcagtgggtctggcggcaatcgagttagacgacgatggcttccccttaaagaagctcgcgatggtgacgtttcgtcacgacggtggcaaagacccggccacgggcaaaaccccgaaatcccgcaaggagaccgccggagtcgcacgccgcacgatgcgcatgcgccgtcgcaagaagaagcgcctgaaggatcttgacaagaaattgcgtgacttaggttacttcgtccctcgcgacgaggaaccgcaaacctacgaagcgtggtcatctcgtgcccgcctcgccgagtcccgcttcgaggatccgcacgaacgcggagagcatttagtgcgcgctgtacgtcacatggcgcgccaccgcggttggcgcaatccgtggtggtctttctcccagctcgaggaagcttctcaggagccttccgagacatttggacgtattttagaacgcgctcaacatgaatggggcgagcgcgtctcagacaacgcaaccctgggtatgttgggcgcgctggccgcaaataacaacattctgcttcgcccgcgtcgttacgaacacaacccgaagacgggcaagaacgcggagaagctgaacgtacgcggacaagagccaatcttattggacaaagtccgccaagaggatgtgctcgctgaactgcgccgcatttgcaaagtgcaaggcatcgaggatcagtacccggagctggcccatgccgttttcacccaggtgcgcccatacgtcccgaccgagcgcgtgggcaaggatcctctccagccaatgaaaatccgtgccagccgtgcaagcctggagtttcaggagtttcgcatccgcgacgccgttgcgaacctgcgcatccgtgtaggcggtagcgagcgccgtccgctcaccgaggaagagtacgaccgcgcggtcgattatctgatggaatattcggacacaacacccccgacctggggcgaggtggccgatgagctcgagattgctgagaatacattaattgcgccggttattgacgacgtccgcctcaatgtggcgccgtacgaccgcagtagtgccatcgtagaagccaagctgaagcgtaaaacgcaggcgcgtcagtggtgggacgatgacgctaacctggacctgcgcagtcaattaattttattagttagcgacgcaaccgacgacacggcgcgcgttgcggaaaacagcgggctccttgaagtattcgagtcgtggagcgatgaggagaaacaaacgctgcaggacctgaagttcgacagcgggcgtgcagcgtattccattgacaccttgaataaactgaacgcgtacatgcacgagcaccgcgttggactccacgaggcacgccaaaacgtctttggcgtctctgacacttggcgtcccccgcgcgaccgcctggatgagcccaccggccaacccacagttgaccgtgttctgacgattgtgcgccgtttcattttggattgcgagcgcgcctggggccgcccccagaaaatcgtagtcgaacacgcacgcacggggttaatgggcccgtcgcaacgcgccgacgtgctgaaagagatcgcgcgcaatcgcaacgcaaacgaacgcatccgtcaggaacttcgcgaaggtggcatcgaagcaccaaaccgcgcagacatccgccgcaattccatcatccaagaccaggagagccagtgtctgtattgcggcaaggagatcggggtgctcaccgcagaactggatcatatcgtcccccgtgcaggcggcggtagtagcaaacgcgagaatctggcggcggtctgccgcgcgtgtaacgcctcgaaaggctcccgccctttcgcagtttgggccggaccagcccgtctggagcgcacaatccaacgtttgcgtgagttgcaggccttcaaaaccaagtcaaagaaacgcacacttaacgcaatcatccgccgcctgaaacaacgcgaagaggacgaaccaatcgacgaacgttcactcgcgtccactagttacgctgccaccagcatccgcgaacgcctggagcaacacttcaatgacgacttgcctgacggtttcgcgccagtggccgtagatgtatatggcggcagcctgacgcgcgaaagccgtcgcgcaggcggaatcgacaagtccatcatgttgcgcggtcaatcggacaagaaccgtttcgacgtccgtcatcatgccatcgacgccgcggtcatgaccctgctgaatccgtccgttgcagtcacccttgagcagcgccgcatgttgaagcaagaaaacgactactcgagcccgcgtggccaacacgataacggctggcgcgacttcatcggccgcggcgaggcgagccaaagcaagttcttgcactggaagaagaccgccgttgtgctggccgatttaatttctgaggccattgagcaggacacaatccctgtcgtaaatccactgcgtttacgcccgcaaaacggctctgtacacaaagatactgtcgaagcggttttggaacgtaccgtgggcgactcgtggacagacaaacaagtaagccgcatcgtggaccctaacacgtacattgcgtttctgtcgctgctgggacgtaagaaggaattggacgcggatcaccaacgtctggtgagcgtgtcagccggtgttaaactcctcgccgatgaacgcgttcaaatcttccccgaggaagcggcatctatcctcacgccccgcggagtagtgaaaatcggggatagcattcatcacgcccgcctgtacggctggaagaatcaacgtggcgacatccaggttggcatgttgcgcgttttcggtgcggaatttccttggttcatgcgcgaaagtggagttaaagatattctgcgtgtccctatcccgcagggcagccaatcgtaccgcgatctcgccgccacgactcgcaagttcatcgaaaatggccaagccactgaattcggttggatcacgcagaatgacgaaatcgaaatcagtgccgaggagtacctggccactgataaaggggacatcttaagcgacttcttaggcattctgccggagattcgttggaaagtcacgggcattgaggacaaccgtcgcatccgccttcgcccgctgctgttgtcatctgaggcaatccctaacatgcttaatggccgccttttaacgcaggaagaacatgacctgattgcgctggtgatcaacaagggagttcgcgttgtagtgtcaacttttctggccctgccttcaactaagattattcgtcgtaataacctgggaatcccgcgctggcgtggcaacggccatttaccaacctcgctcgacatccaacgtgcggcaacccaagcattagagggtcgtgac

SEQ ID NO: 5580 - DNA, 3402 bp, synthetic construct
  misc_feature 1..3402: note = Description of Artificial Sequence: Synthetic polynucleotide
  misc_feature 1..3402: note = MG3-4 sequence codon optimized for E. coli
  source 1..3402: mol_type = other DNA
atgagcactgacccaaagaattaccgcattggcgtggacgtgggcgatcgttcggtcggactggcggccattgagttcgacgacgccggctttccgattcaaaagctggcacttgttacgtttcgtcacgatggcgggctggatcctaccaagaacaaaacgccggtaagtcgcaagaagacgcgtggcgacgcccgccgcactatgcgtatgaatcgccgtcgcaaacaacgccttcgtgatctggacatgatgttgaccaacttagggtatacagtacccgagggaccggaaccggaaacatacgaagcctggaccagtcgcgctcttcttgcatcgatcaaattagccaatgtggacgaattaaacgaacatctcgtccgtgcggtacgtcacatggcccgccatcgcggctgggccaacccttggtggtcgatcgaccgtttagagaatgcgtcccgcgagcctagcgaaacgttcgaaatcatcttggcgcgcgcccgcgaacttttcggagaaaaggtaccagcagaccctaccctggggatgttaggcgccctggcggcgaacaacgaagtcctgctccgccctcgtgacggcaagaagaagaaaaccggctacgttcgcggcacgccgttattagttgccaaagttcgccaagaagatcaactcgcagaactgcgccgtatctgcgaaatccaaggcatcgagggacaatacgatgcgttgcgttcggcgatcttcactcacaaaatggcgtacgtgccaaccgaacgcgtgggcaaagacccgctcaaccccagcaagaatcgtaccatccgtgccagcttggaatttcaagaatttcgtatcttagacagcgtagcaaaccttcgcgtccgcacggactcacgcagtaaacgcgaactgacggaagcagaatatgacgttgcggtggaattcttaatgtcctatacggcgaacgaacaaccttcatgggcggacgtggccgaagttatcggggtcccggggaatcgcttaatcgccccagtgttagaagatgtgcaacaaaagactgctccgtttgatcgcagctccgcggcgtttgaaaaggcaatgggcaagaaaacagaagcccgccaatggtgggagagcaccgacgatgaccaactgcgcagcttgtttattagtttcctcgtggacgcgaccgacgacaccgaggaagcggccgctgaggcgggcttacctgagctttacatgagttggccagcggaagagcgtgaggttctgagtgacatcgacttcgagaaaggccgcgtggcctactcccaagaaacgttgtcgaaattatcggaatatatgcacgaatatcgtgtgggcttacacgaggcacgcaaagcagttttcggagtagatgacacatggcgcccgcccctggacaaactcgacgaacaaacaggacaacctaccgtggatcgcgtcctcaccatcttacgtcgcttcgtcctggattgcgaacgccaatggggccgcccacgtgccattacggtcgaacacgcgcgcacaggactggttggaccggcacaacgccaagaaatcctgaacgagcaaaagaagaatcgcgaaaacaacgaactgattcgtggcgatctccgcaaaagcggcgtcgagaacccaagccgtgccgaggtacgccgccacctgatcgttcaagaacaagaaagccaatgcctgtattgtggggccgttattcgcaccgacacctctgaacttgaccacatcgtcccccgcgcgggcggtggcagtagtcgccgcgaaaacatggcagcagtatgtcactactgcaactctaagaagaaacgcaccttgttttacgactgggccgggccggtcaaactgcaagaaacagtggatcgcgtccgtcaattagaagcgttcaaagactccaagaaagcaaagatgtttaagaaccaaatccgccgcctcaaacaaaccgaagcagacgtacccatcgacgaacgcagcttggcgagcaccagttacgctgcggttgcagtccgcgaacgcctggaacaacatttcaacgaaggcctggccccagacgacaaatcacgcgttgttctcgatgtgtacgcgggcgcggttacccgtgaaagtcgccgtgcaggcggcattgacgaacgcatcctgcttcgtggggaacgcgacaagaatcgcttcgacgtccgtcatcacgctatcgacgcggcggtaatgacgctgttgaaccgctcagtggcgctgacccttgaacaacgctcccaattacgccgcgctttctacgaacttgaacttgacaagctcgatcgcgaccaactcaaacccggtgaggactggcgcaatttcacgggattgtatgaagcctcacaaaacaaatttagcgaatggaagaaggcggcaaccgtgttaggggacttattagcagaggccatcgaagacgacgcgatcgcagttgtttctccgttgcgcttacgcccccaaaacggtagcgtccatgacgataccatcaacgcagtcaagaaattaaccctgggctcagcgtggccggcggacgcggttaaacgcatcgtagacccagaaatctatctcgccatgaaagatgttcttggcaagctgaaagaattgccggaagactcagcacgtagtttagaactttctgacggtcgttatatcgaagcggacgacgaagtgttgttctttccaaagaaagccgccagcatcctgaccccgcgcggtgccgcggaaatcggcaacagtatccaccacgcccgtctttacagctggcttactaagaaaggagagttgaaatttggcatgctgcgcgtttacggggctgaatttccttggttgatgcgcgagagtggcagtcgcgacgtgcttcacatgccgatccaccctgggagccaaagttttcgtggtatgcaagacggggttcgtaaagctgtggaatcgggtgaggccgtcgaattcggttggatcacccaagacgacgaactcgaattcgacccagaggattatatcgcccatggcggcgacgacgaacttaaccgcttactgcgcgtcatgccagaacgtcgctggcgcgttgacggattttacaacgcaggcacactgcgcatccgtcctgccctgcttagtgcagaacaactgcccagcgaactgcaaaagaaagtggccgacaaaacactgtcagatgtggaactgatcctgctgcgtgcggtgcaacgtggactgttcgtggccatttcaagtttcctgccattagaaagcttgaaagtaatccgtcgtaacaatcttggctttccgcgctggcgcggcaatggaaacttgccaaccagctttgaagtgcgcagcagcgcacttcgtgcgttgggcgttgagggg

SEQ ID NO: 5581 - DNA, 3009 bp, synthetic construct
  misc_feature 1..3009: note = Description of Artificial Sequence: Synthetic polynucleotide
  misc_feature 1..3009: note = MG14-1 sequence codon optimized for E. coli
  source 1..3009: mol_type = other DNA
atggaaattacaattaaccgtgagatcggcaaattaggcttgcctcgccacctggttctgggtatggacccgggcatcgcctcatgtgggtttgccctgattgatacggctaaccacgagattctcgaccttggagtgcgcctcttcgattcgccgacccacccgaagaccggacagtctctggcagtcatccgtcgtggatttcgttcgacacgccgtaatatcgatcgcactcaagcccgtctgaaacattgcctgcaggttctgaaagcctacgggctgattccgcaggatgctacgaaggaatattttcatacaactaagggtgataaacaacctttgaaactgcgtgtagacggactggatcgtcttttgaatgaccgtgaatgggccctcgttctgtatagcctgtgtaaacgtcgcgggtatattccacatggcgaggggaaccaagacaagtcgtctgagggtggtaaagtgttgtcggcgctggccgctaataaagaggcgatcgccgaaacatcctgtcgtacggtgggtgagtggctggcccaacaaccgcagtcccgtaaccgcggtggaaactatgataaatacgttacccatgcacaactgattgaggagacccacattctgttcgacgcgcagcgttcattcggatctaagtatgcgtcccctgagttcgaagcagcctacattgaagtgtgtgactgggaacgcagccgtaaggattttgatcgtcgtacttatgatctggtaggtcattgtagctactttccgaccgagaagcgtgcagcgcgttgtaccctgacttccgagcttgtgagcgcttacggtgcgctgggtaatattactattattcatgagaatggcacatcacgtgctttatcggcgaccgaacgtgacgagtgtatcgcgattttattttcttgtgaaccgatccgcgggaataaggactgcgcggtaaagtttggtgcactgcgcaaggccctggatctgtcaagtggagactatttcaaaggcgtgccggcggcggatgagaagacccgtgaagtatataaaccgaaagggtggcgtgtcttacgtaacacacttaacgccgcgaatccgatcctgttacaacgccttcgtgacgatcgtgaccttgcggacgcggtaatggaagcagttgcgtactctagcgcactgccggtcttgcaggaacaattgcaaggactgccccttagcgaggcagaaattgaagcactgtgtcgcttaccgtacagcagcaaggccttaaatgggtacggtaatcgcagcaagaaggctttagatatgttactggactgtctggaagaaccagaagttctgaatttaacccaagcagagaacgattgtggcctcttaggtttacgtattgccggtgcgcaattagaacgttcagaccgtttaatgccgtacgaaacgtggattgagcgcactggccgcaccaacaataacccagtggtgatccgtagcatgtcacagatgcgcaaggtagttaatgctatttgtcgtaaatggggagtaccgaatgagattcatgtggaattggaccgcgaactgcgtctgccacagcgtgcgaaggatgaaatcgcaaaagcgaacaagaagaacgaaaagaaccgtgaacgtatcgcaggccagattgcagagttacgcggatgtacagctgacgaagtgaccgggaagcaaatcgagaaatatcgtttatgggaagaacaagagtattttgacttgtatacaggtgccaagattgaggttgaccgtctgatctccgatgatacgtatacccaaattgatcatattttgccattttcgcgtactggcgagaatagtcgtaataataaggtgttagtgctggctaagtcaaaccaagacaagcgtgagcaaaccccgtatgagtggatgtctcatgatggggccccgagctgggacgcgttcgaacgccgtgtgcaagagaatcaaaagctgagtcgccgtaagaagaattttctgttggagaaggatctcgacacgaaagagggagagtttctggcgcgttcttttacggatacagcatacatgagtcgcgaggtgtgtgcctatttagcagattgcttattgtttccggacgacggtgcgaaagctcacgtcgtgccgacaaccggtcgtgctacggcgtggttacgccgtcgttggggtctgaatttcggctctaacggtgagaaggatcgttctgatgaccgccatcacgcaacagacgcgtgcgttatcgctgcctgcagcccgtcgctggttatcaagacggcgcgcattaatcaggaaactcattggagtattacgcgcggaatgaatgaaactcagcgtcgtgacgctattatgaaagccctggagagcgtgatgccgtgggagacattcgccaatgaggtccgtgccgcccatgactttgttgttcctacccgtttcgtgccacgtaaaggcaaaggtgaactctttgaacaaacagtgtaccgttacgcgggtgtgaacgcgcaaggtaaggatattgcgcgtaaagcgtcgagtgacaaagatattgtgatgggtaatgcggtagtatcagccgatgagaaaagcgtgattaaagtttccgaaatgctttgtttacgcctgtggcacgatcccgaagcgaagaaaggtcaaggggcgtggtatgccgatccagtgtacaaagcagacatcccggccttgaaagacggcacctacgtaccgcgcatcgcaaaagcacacaccggtcgcaaggcgtggaagccggttccggagagcgcaatggcgaaaccgcctttagagatttatttcggcgaccttgtacagattggtgactttattgggcgcttctctggttataatattaacaacgcgaattggtcattcaccgatcgcctgactcgccttaatttgtcatgtccgacggtgggccagctgaataatgatctgagtccggtcgtgattcgtgagagcccgattaag

SEQ ID NO: 5582 - DNA, 3246 bp, synthetic construct
  misc_feature 1..3246: note = Description of Artificial Sequence: Synthetic polynucleotide
  misc_feature 1..3246: note = MG15-1 sequence codon optimized for E. coli
  source 1..3246: mol_type = other DNA
atgaactatgtgctcggcctggacgtcggtattgcttcagtgggatgggccgtgcttgagttgaatgaagaggacaaccccattcgcattgagggtcttggtgcgcgcatcttcgataaagcggaagtgcccaaaaccggggccagtctcgccgcacctcgtcgcatgagtcgtggcatccgtcgcgtgattcgtcgtcgccgctttcgcttacaacgcgtccgctcatacctgaagaagcacaacattctccctgccgagaaggttgatcacttatacgacgttccatctgccatcgacatctacgagctccgtaagcgcgcactgactgagaaggtcacagccgaggagtgggcgcgcctgttaatcttcttcgcgaaacaccgtggtttcaagtccaaccgcaagaaggcttcgggagacgccgacgagggcgagatgctcaaggcgatcgcagcaaacgccgaaatcctgaagaactatcgtacagtgggagagatgctgtgcgacaacgagaagtttcgtaaacgtaagcgtaatcgcgatggcgcatacaactttactgtctctcgtgcgatgctgatggaagaaattcacacgctgttcgagattcaacgcaacttgggccagaagttcgcggacgagaagctggaagaggagtacgtgatcctcttcgccgctcaacgtaaattcgatgaaggacctggagaaaattcgccgtacgcggggaaccagattgagaagatgatcggttcctgcacgttagagggcaagaaagagaagcgtgctccaaaggcctcatacgcatttatggcatttaatttatggcaaaagatcaatcacttgaaagtcaatcgtcgtggtagtgaacgcttcctgaccgaagaggagcgccgccgcattgcggacctggcgtggaagaaggagaagcttacctacggttcactgcgtaaggtgctctcgttggaccccgaggatcgcttcgttggcctgcgttacgacctcaagaaaggcaaggccgagaacttagaagaacccgtttctgaggcagaaaagcgttccttttcatgggtcaaggattatcactccattcgtaaggcccttgacaaggtggagaagaatcgcattttgaagctctctcacgagcaactggacacaattgccaccgcgtttagtgtttacaagaacgaagagaccattgaaaagtacctggaagagggcggcattggtaaggccgacggtgaggcgctgcttgagcgtttgagcggatttagcaagtttggtcacctgagcctgaaggcgtgttataagctgctgccgttcctggagaagggcgaggtgtactcacgcgcttgtgagttggcggggtacgactttagtaaatcgtccttggagaacattgacgacattccgaacccggtcgtaaagcgctcgatttctcagacccttaaggtgattaacgcgatcattctgcgctacggcaacccagttgaggttcacattgagttagcacgtgagctcgcccgttcttttcgcgaccgcaagaagatggagaagggtatgcaagagaaccaagcgaagaacgagaaaattcgtcagcgcctgattagtgagttcggggtgctgcgcccaaaaggcatggacattgttaagttcaaattatgtgaggaacaaaacggggagtgtgcctactcgcaaaagcactttgacatggaaaagttacttaaggacccgagttacgccgaggttgaccacattatcccgtactcacgctcattcgacgacagttataacaacaaggtgctggttctgacgaaggagaatcgtgagaaacgtaatcgtatcccgatggagtacctcgccgacgcgcctgagcgcaagaaccgtttcattcactgggtcaaatccacaatccgcaatagtcgcaaacgtgagaatcttctgcgtaccgattacacggcgactaccgagaatgagtggaagcgccgtaacctgcaggacactcaatacatttcgaaatatttatataactacctgcgccatcacctggtccttgcgaaaggttacacagagcgtaagcgtcgcatcattccggttaacggtgctgtaaccgcatactttcgcaaacgcctgggtattaacaagattcgtgagaatggcgacctgcatcacgcggtggacgccgttattattgcgtgtgccacacagggaatcgtcaacaaagtttcccgctatagtaaatcgcgcgaactctgggactacgaggtcgacatggagacgggtgaggtgctgcagaagaagaacaagaataccaaggatgtctttccggagccgtggcttaactttcgttacgagttggagcagaaggttcgtgtgcgccccttggacattcccgagacggcagacatcacggagatggaagagccgttcgttagtcatatgcctaaccgtaagatccacggtcctgcccacaaagagactatccgctctggccgccttaaagaggaaggttacacaatcagcaagaccgctctcatcgacttaaagcttactgaggacaaggaagagattaagggctattataacaaggagtcggaccgccttttgtacgaggctttaaagaagcagctgcagcgctacggtggcaaagctaaggaagcgttcaaggagccgtttcacaagcctaaagcagatggtaccccgggcccaatcgttaacaaggtaaagatcatggagaagagcactatgttaatcccggtgaacggcgggaagggtctcgcgtcaaacggcaacatggttcgcatcgacgtctttcgcgccgaggagaaaggtaagaagaaatattacttcatcccggtttatgttgctgacactgttaaggaagagcttccgaaccgtgcggtcttggcccacaaaccatacgaagcctggaaaattatgaaggaagaaaacttcatcttctccctctacccgaacgaccttatcttcgtcgacgccggtaaggaaatcccgttcaaagccgcactgaagggtagcacccttgacccggaaaagaaagcatcgcgtttcctgatgtactacaaaggggccgacatcgctaccggtagtattagtggcgtgaaccacgacgaaacctacaaagcacgcggcgtaggtattcagtcactgcgcgagattaagaaatgttgcattgacgtgctgggcaacatcagcttcgcttccaaagagaagcgccaaacgttccgt

SEQ ID NO: 5583 - DNA, 3681 bp, synthetic construct
  misc_feature 1..3681: note = Description of Artificial Sequence: Synthetic polynucleotide
  misc_feature 1..3681: note = MG16-2 sequence codon optimized for E. coli
  source 1..3681: mol_type = other DNA
atgaagcgtatcctggggctggatctgggcacaaatagcatcggctgggctctggtggaagtggacgaggacggtaagattatcaagatccttggcatcggttcccgtatcatcccgttgagcccggatgacgcgaacgaattcacgacgggcaagagcatcacgaagaatcgcaagcgcaccgagcaacgcaccacgcgcaagtgtttcgaccgttaccagctccgccgcctgttgttaaccatcgaacttcgtaagtttaacatgctcccggacgaacgcttaattaagctgccggtcctggacctttggcagctgcgcgcaaaagccgcgacaaagggtaaccgtctgaccctgccggagctgggccgcgtcctgtaccatctgaaccagaagcgtggctacaagcacgcgaagagcgacgagtctaacgacaagaatcagcgcgagtacgtggccaacgtcaacacgcgctacgccaacattaaacaactgggtaagaccattggccagttcttcgccgagaagcttgaagagaaccaggtgattactgagaagggcaagttctacacctaccgtatcaaggaccaggtatttccccgcaaagcgtacgaagaggagttcgaccagattatggaatgtcagcgcgagttctaccccgaaattctgaccgacaagtttattgacaaggtgcgtaacgagatcatttactaccagcgtaagcttaaaagctgcaaacaccttgtgagcctttgcgagttcgagaagcgcgcgtacgtcaacaaagacggcaaggtagtgtacgacggtccaaaggtagcaccgcgcacctcgcctctcttccaggtgtgcaaaatctgggaaagcgtgaacaacttgaagattaagaaccgcaagaacgacgagctgtacattacccaagagcagcgcattgcgatgtttaatttccttaacaataacgagaaaatgacccttagcgacatgtacaagatcttgaagatcgataagagcgatggctggtggggcggaaaagcgattggtaacggcctgcaaggtaacaccacgaagatgcagttaaagaaggccctgtcgaactgccagaacgttgacgagctgcttcagttcaacttggacatcgtggactcagataagattgacgaggagaccggcgaggtgctgaaggtagtgtctcctaactgtgagcaggagccactgtacaagctgtggcacacaatctacagtatccaggacaagaacgagctgaagaacgtcttacagaagaagtggggtatcacggacgagaccaccttaaacagcctcttcgcgctggacttcgtgcgccccggctacggtaacaagtcgagtaagttcattcgcaagattctcccttacttacaagacggtctgatgtacaacgaggcgtgcgcttatatcggcgtcaaccacagtaactcgctgacgaaggcggagaacgacgcgcgtgagctgctggagaagctgccgcaaatcaagaagaatgagctgcgccagccggtcgtagagaaaatcctgaaccaaatgatcaacgtggtaaacgcgattttcgacaagtacgggaacaacaacggaatcgacgagattcgtgtggagctggcacgcgagttgaagcagagccgcgaggagcgcgagctcaccgacaagaacaaccgcaaccgtcagaaggagaacgattcgaacgcgaaactgattgaagagtacggcatccgcgcatcccgcaaccgtatccagaagtaccgtatgtggaaagaaagccgccagacctgcttttactgcggccaggtcgtggacgtgaaggacttcttgcgcggttacgacgttgaagtggagcacatcatcccgaaagctctgttcttcgacgactcgttcagcaacaaagtgtgcagttgtcgcaagtgcaacagcgaaaagggtgagcgtaccgcgtacgactacatgagctcaaagggagaggacgagctgaaccgctatatccgtacagtcgaggatcgttgcaagaagggcgaaatctcgaagacaaaacgtgagcgtctgttaacgccggccgacaagattccaacggacttcatcaatcgccagcttcgtgagacccagtacatcgcgaagaagagcgttgagatcctgaagcagatctgccgcaacgtttggaccacctctggtagtgtgacagacttcttacgtcacaactggggttatgacgaaatcttgcacactctggacttcgatcgctacaagagcggtggcctgaccgaggtaatcgaaatcgagcacaagggccagaagcaccgcattgagcgcatcaaggactggagcaagcgtctggaccaccgccaccacgcggtggacgcccttgtggttgcctgcaccaagcagagctatatccagcgcctgaataacctcaacaccgagcgcgacgccatgtaccaagacatcgaggcgcagagcgtcgagtggaaggagaagcacagcttgctcgagaaatggatcaagttacagccgcacccgacggtgagcgaagtcacagacaaggttgacgagatcttggtatccttcaaagcaggcaagcgcgtagccactctgggtaagcgcagcgtttacaagaacggcaagaaaaccgtggtgcagaacaacattatcgttccgcgcggggcactctgcgaggagtcagtatacggccagatcaaccttatcgagaagaacaagccgattaagtatttgttcgagaacccgagcctgatcttcaagccgtacatcaaggccctggtcgaggaacgcttaaaggagtacaatggagacacgtcgaaggccatcagcagtctcaagaacaatccgatttaccttcgcaaagacaaatcagtagtgcttgagtacggtacctgttataagaaggagtacgtaaagaagtactcgctgaactccattaaagctaaggacgtggacagcatcatcgataagcacatccgcgaagtggtccgtcagcgtctcgaggataacaataacaacgagaaggccgccttcgcgagcccgctgtacgcggataagcagaagcagatcccgatcaagagcgttcgctgtaccactggcatcaacatcgccgcccccgtaaactacaacgagtctaacgatccgatttctttcgtgaaaccgggcaacaaccaccacatcgccatctacaaagacaaagacggcaagcgtcaggaacacattgttaccttctggcacgcggtggagcgcaagaagtacggcatgcccgtagtcatcaccaaccccaaggagatttgggacctcatcatcgagaaaagcttggacttgccggagagtttcttaaactgcctgccgaacagcgactggaactacgagatctccatgcagcagaacgagatgttcgtgatgggcatgagcgaagacgagtttcaagacgccatccgcaataacgactacaagacccttaataagtacctgtaccgtgttcaatcggtcagtgagagcgactactggctccgtctccatatcgagaccatgaacgacaagacgcctgagggtaacatcatcaagaagtactaccgcattaagtcaattaacaccttcttcaacttcaacccgcacaaggttaaaattaccttgctgggtgagatccagagtagt

SEQ ID NO: 5584 - DNA, 4044 bp, synthetic construct
  misc_feature 1..4044: note = Description of Artificial Sequence: Synthetic polynucleotide
  misc_feature 1..4044: note = MG18-1 sequence codon optimized for E. coli
  source 1..4044: mol_type = other DNA
atggaccagagtaaagagtactacattggtctggatggtggtacggactcggtcggatgggcggtactcaacccggactataccgtcgtgaagaagcgtggtaaaagcctttggggcgtacgcttattcgagagtgggcagacggcggcggagcgtcgtttagcccgttcggcgcgtcgtcgtacggatcgcaagaagtggcgtctgaaacttttaaaggaactgttcgcggaagaggtggctgcgtgcgatcccgcgttcttcgcccgtctggcagagtcccgttactgggaagatgacaagaaagttgatggtgcggatactttattccatgacgcggacttcaccgacaaggattaccatcgtcaattcccgacgatttaccacctgcgccgtcatttaatgtgttgtactgagaaaccagacattcgtctcttgtaccttgccgttgcccatatgattaagaaccgtggtcacttcttgaatgagggccaagacttgaaccaagtccgtcgtttcgatgacgtatggcagaatctttgtgcggctgtatcggacgttttagggatcgagttagccgtcgagaatggcgcgaaggccgctgaagtattaaccagcagcgttaaaattaaggaaaagacgaaacaattggaatcagtactgggcgagggtgagtcggaagcggatcgtagtgtttgtaaagccctggctggtttacttgcgggtgcgaaagtttcagccgtagacttattcaatggtgatgaggcattgaaagaatgtggaaagttttcactggcggagaagtcgatcgaggagctcgaacccgacctgggtgacgccttgggcgaggaacgtttcagccttttacaatacgcctacgcggcttataattgggccgtgttcgctcgtctcctgccagaaggcaagacaatttctgaggttaagacagaagagtatgaggcgtataaagcggaccttcgcgcattaaaacaattagtgaagcagtacgccagcgaccagtactatcgcgtctttcgtagcgcaaagattaaaggaaattatgccagctacgtaggtaagaccaactgtggaaatgagaagtcgaacccggagtcgtgtaaaccagaggagttcttcgcgttcctcaagaaggaattaaaaccactgtggtcccagaatatccccgccgccgcgtcactggctgcgaaattagagagcggcactttactccgtcgtcaacgctccggtgaaaatgcggccattccgtaccaagcccaccttcaagaattacaaattatcttaaagaacatgcaacaattttacccattcctgcagaaggcggacgagaatggtttcacccctgcatacaagatcgagaaactcttgacgtttcgtatcccttactacgttggtccgttaaacgacgcacataaagagaagggattctgttggatcgtcaagaaagcggacgttccagtgctgccctggaacttcgaccaagttgtcgatgagaatgcatgtgaggacgctttcattggccgtatgtctgcgacgtgtacttacttagtcggtgaaaacgtacttccccaaaactcgccactctattgtcgcttcatggtcttaaatgaattaaacaacttacgtatccgttcagagaaaattacgccggctttgaaacaggccatctttacacaattattttgtgctgggaagggtggtaaagttactcaaaagaagctcttggacttcttacacagccaaggtatcgacgcgaataaacaagacatttcgggtatcgatggtgacttcaaggcgtcgatggcgccagcagtgaaacttcagtctatctttactgaaccgttgccgcctgagatcctcgagcgtttagcatttgcacttaccgtgtcaggagagtctcacaaaatgttgcagaatcgtatccgtgccatccttcctaacgcggataacgcggtcattcgtaaggtgtgtgcgctcaagtttacaggatggggacgtttatcgcagaaacttctgactgaaatctacgacgtcgatcagactacaggggagtgtcgctccctcatggacttgctttggagtaccaataataaccttatgcaacttttatcaggcgacttcaccttcgcagcgggtattgacgcgtacaacgcggctcagaatggtaccgagaatatcttcgactacgatcacttggttaaggacttgtacgtctcaccgtcagtcaaacgtggtctgtggcagaccctgctgctggtcaaagaggtccgtaagattatgggttgcgatccggcccgtgtgttcattgaaatggcacgtggagtaagccctgaacagaagaataagcgtactgtaagccgtaaagaccaattactggccctctacaaggcatgtaaggaagacgcacgtgattggtgtggtgaattagaagcgttaccagaagataaattgcgttcggataaactttacctctactatacacaaatgggacgttgcatgtattcgggagagccaatccgtttagatgatctgatgcatgatacggcaaaccaactttacgatattgatcacatctaccctcaatccaagactaaagacgattcgctcactaatcgcgttcttgttaaacgtcaattgaatgcaatcaagtcgaatgactaccctttaccccagactatgcgccagaccgctctgtggaaggcactgctggagaagggcctcatttcaaaacagaaatacttacgtttgacacgtacgactcccttcactgaggaagagttggctggtttcattaatcgtcaattggtagagacccgtcaaagcactaaagcggccgcgcacttattggaacaattgctcccaaatacggaagtggtatacgtgaaagctggcttggccgccgactttcgtcaagagtttggcttcgttaaatgtcgtgacgcgaacgattttcatcatgcaaaagacgcatacttgaatgcggtcgtcgggaacgtctatcatgaaaagttcacgaagaacccattgcgcttcgttcgtagtggccaagagtattccttaaacttaagcgccttatttcagaattggaatatctacaaaggcggccgtgttatttggcagaaaggagaggatggtagcctggagactgtacgcgcccgtatggcgaagaatgatccaatggtcactcgttactgtacagaaggccgtggagcgctgtatgatttgcaaccgatgaagaagagtaaaggtcaactgcctcttaagtcgtcagacgagcgtttgcaacacattgatcgttatggcgggtacaataagctggctggcgcgtatttcacgttagcggcatactataagaagggtaaacgtgttaagtcaatcgagtcggtacccttatacctcgcggcaaaattgcaacgtgaccccgccgcactccaacaataccttgcagatcagctcggaacggatcgcgttgagatcctcgtacccgaaattaaactgggtactttatttaaatggaatgggtacccaatgacgttatcgggccgcacgggaccccagctgttatttcgtaacgcggccgagttacgtactaatgcagaacaagagcaatatattaagaagatgagtcgctacctggagaagtgtaaggggcgtaaagaacctcttccgattcgtccggcatacgataagttaacccccgaagagaatttacaattatatgacgcctttacacagtggttgactagtggaatttacgcgaagcgtctgagtttgcaagggaagtttcttcttgaaaagcgtgacgcgttcgccgcactgtcgccggaagcgcaagtccgccaattaatggaaattcttcacctgtttcaatgtaatccggtcgcagctaacctgtcggaactcggtggggctgcccatgcggggatcctgttggcaagcaagaacatcgatggtaaagtcccggtatcgattgttcaccagagcgtgactggttatttcactcaagaggtgtgtttaaatgatctg

SEQ ID NO: 5585 - DNA, 3294 bp, synthetic construct
  misc_feature 1..3294: note = Description of Artificial Sequence: Synthetic polynucleotide
  misc_feature 1..3294: note = MG21-1 sequence codon optimized for E. coli
  source 1..3294: mol_type = other DNA
atgaccagtcacagcatccgttatacccttggtttggacatcggaatcgcgagcgtgggatgggccgtccttcgcaacgggagcgactccgaaccttaccgtatcgaaacccttggtgtgcgtatctttgataaggctgaagtaccgaaaactggcgcaagccttgccgcccctcgtcgtgaggcccgttcatcccgtcgcgtagtccgtcgtcgtcgccatcgcaaggaacgcattaaatacctgatcgaacaagagggcattatgacccaggccgagatgacccgcttgttccagaacagctcgttcgagaagagcgtgtacgagattcgcgtagaggccctggaccgcatgctgacccgtgaagagacggtgcgtctcctcatccatttcgcgcaacgccgtgggtacaagagtaattcgaaggcagaagaggcgaaggacaatgaaaatggtgtgattaaacaggcaattagccaaaacaaacaggcaatgaaggcccacggttatcgtaccttcggagaaatgttattgatggacgagcgcttttactatacccaaccagatggttctcgtatctttatcccgcataacaaggcgagtgattataaggtgactgcggaacgtagtatgttggccgacgagttacacatgatcttcgctgcgcaacgtagtctcggttccctctggttcagcgacaccttcgagacagcatacatggacgtgtggagctcccaacgttccttcgatgagggcccaggcggcgactcaccgtatggtggctcgcagattgagaaaatgttagggacctctagcgacggcgagagccgcgcccctaaagccagctacagcgcggaatacttccgcctgctccaggatgtgaaccatctccgtatcgtgagcttagacggtacctcaagtcctctgacccaagagcaacgcgacattgtagtggctgcgagtaagaagagtggtaccttgacatacacccaattacgcaagaagctggctctcgcagatgaccaatactttaacgccctgtactacggcgataaaactgcagtcgaggtggagaagaagcgttttggtcatctgcagttctaccaccaactgcgtaccgcccttgacaccgtcgagaagggcgctgccgacacgctgacgtgggcccaacgcgacgaaatcgcacgcatcctgacagtttacaaggcggacgttcgtcgcaccgacgagttacgtaaagccggtatcccggcggagtacatccgcgccctgctcccattatcgccgacccgtgcgatgcacctgagtgtgacagctattcgcaagatgatccctcacttagaagccggtatgtcgtatagcgacgcctattccaaggcctatggcaaccaatcgacggcgtccgcagccccgaagaagaacaaactctcactgaacgatatcgaagagatcaccaacccggtagtacgtcgcgcggtcagccaatcgattaaagtgattaacgctatcgttcgtcagtatggcgcaccagagcgcgtgcgcatcgaattggcgcgtgagatgggtaagaattttaaggatcgtggcaaaatcgcaaagagtcaggccgaccacgcggctaagaatgagcgcatcaaagcccaaatctcagagtacaagagtgatcatattacgggccaagacattgttaagtttaaattgttcaaggaacaagatggcatttgcttatattcgggcaagtcgcttgatatcgcccgtcttttcgagccggggtacgtggacgtggatcatatcatcccgtactctatcagcttcgacgattcatacaataataaagttttggttttaagtagcgagaatcgccagaaaggcaaccgcatcccgtacgcatactttggccagaatagcgaccgttgggagaagtatgagacgcttgtatcaaataccgtccgcagttatcgtaaacgcaagaatttgcttctgaaaagccttagtgaagcccaaatcgacggttttaaacagcgtaacctgcaagacacccagtatctcagtaaagtaatctttcgccttattgaaaatcatctccaattcgcagagaccgctccgggcaagaagcacacgcaacccgttaacggtgcgattaccgcgcaagtgcgtaaacgtttgggcatcgaaaagattcgcgaagatggtgacttacaccacgcagtagacgcggccgtcatcgcgtgcatcaccccgggcatgattcaaaagatcaccaagtacgcgcagaaccatgaacgcttttacgccactgccaagggttacgttgatatcgagactggtgaggtgctgacccgtagtgaatacgaagcgatggacgacattcgcttcccggagccatggccggggtttcgcagcgagctggaagctcgcgtgagtgaacacccacaagaggcgatcgcgcgcctgaaattgccccattacgagaatagcgaagaaattcgccccattttcgtgtcgcgcatgccgaaccacaaggtcaccggcgcagcacacttggagactatccgtagtaagaaaggtggagcaggctctaccgtaactaagaccgccttgccggacctcaagttggataagaatggcgagatcgcaggctactatcgcaaggaagacgatccgttactgtatgaggctctcaaagcccgcttgaaagcgttcggcggagacggcaagaaggccttcgccgaaccttttcacaagccgaaacataacggtgagccgggccctatcgttaagaaagtcaagatccaagagtccgcgacgctgaccgtacccgtcaaccatggtatcgccgcgaacggctccatggtccgcttagacgtgtttcacgtcgatggtgacggctattacttcgttcccatctacacttcggacaccgtgaaacccgaattaccgaaccgcgcggtcgtcgcggggcgccgtgtccaagaatggaaagtgatggacgatagttactttaaatttagtttatacccgaaggatttaatccgtattcgcagtaagaagggtatcaaactcaaagcggtgaatcgcaacgccgaccttcaagaatacagcactaacgattgtctgtgttattttgtcaagttcaatatctctactggcgcgctgagcgtagagaatcacgaccgtaagttcgaacagcccggattgggtggtaaaaccctcttatcaattgagaagtaccaagtagacgtattaggaaattacagcccggtagccttaccagagaaacgcatgaaatttcgc

SEQ ID NO: 5586 - DNA, 4563 bp, synthetic construct
  misc_feature 1..4563: note = Description of Artificial Sequence: Synthetic polynucleotide
  misc_feature 1..4563: note = MG22-1 sequence codon optimized for E. coli
  source 1..4563: mol_type = other DNA
atgacgaagaatactcgtaatattatcggtctggatctgggcacgaactccatcggttggtcatggatccagcaactcattagcccgacaccgacccagccatcggagtacttgttcgatggcacccccatcatccgcatgagtggttcccgtatcatccctatgccgggtgacgtgaccgggtcattcgaacgtggagagactattagcaaaacgaaggatcgtactgccaaacgtatggcccgtcgtatgaatgagcgtttccagcttcgtcgcgagcgcttgaatcgtgtattaaacatcatggggttccttccggaacattacgctcgtgccctggatcgttatggtaagctgaatgaggagtctaatactactattgcctggcgttcgaaagaggatggtaagaacgagtttatcttttaccctagcttcttggagatggcctcgatcttcaaagaacatcatccggacattcagcgtatcccccttgattggacgttgtactacctgcgttctaaggcgttgcatcaggcgattactaaagaagagctctcctgggtcttgcactcatttaaccaaaagcgtgggtattaccagagccgtgaggatattacggaagaggataagaccaagaaagtggaatatattaagggcgtggtgaatagcgtcgaggatacgggcgagaaggccaagggtaagaagatctacaaggttacatttgcggacggaaccgaattcacctcgacgaaaagcgaggcaccactgtggatcggtcgtacgcgcgagattatcgttaccactagcctggatacttcaggcaagccgaagttagataaagagggtaagattatccaatctgcgaagaccccggacgaaaaggattggacgcttattaaaattcgtactgaggcaacgattgacgattctaagttgactgttggcgagtatatcttccatgcgctcctgaagaatccggaaacgaagattaagggcgcgcatgtttctacaattgatcgccgtttctatattaatgagattaatgcgattttgaaggaacaggagaagtatcacgaggagctgcgcgataaatcactgtatgaacaatgcacacaggcgctttacgcgcagaatgaggtgcgtcgtaatattattgcgccgtggtctatgagcgatcttctgatcaaggatattttattctatcaccgccctctcaagtctaagaaatcacagatcagcgagtgttcgttagaattccacacgtacacggataaggatggcgcgacccatcgtcagggaattaagtgtattccgaccagtcacccactgttccaagagtatcgtatctggcagtttatcgcgaatttacgcatctatgagcgcgaacgcttcgataatggaaaacatttcattaacgaggatcgcacgagcgacttcttaaccacgaagaagaaggaagagctgtacgagtggttagcagaaaaggacagcgttagtcaaaagacgctgcttggccatctgggcttaaaagtggagcgctaccattggaactttccggaagaaaagacttacccgtgcggcgagactcgtcacctcatccaatcacgcatgaagaaggcgaacctgcaaaaggcgtttcacagcctcatctcggacgaacagaaggactgctttgagcgcggcctgtggcacattttatacagtgttagcgattacaatgaactttgtaaagccctgaagaccttcgcgcgtaagaccggctttaccttagaggagcagtcgttgttcgtcgaggcattctcgtcgtgtcccccatttaagaaggattatggcgcatatagtaagcgtgctattacgaagctgctgccactcatgcgtattggcaagttctggcatgaggagagcattgacagtaccaccaaaacacgtatcgagcaccttattagcggcgaagagtgttcaggtattgatgtgcgtgtgcgcgagaaggtgacgaaggcgggtctgtgtgagtctatcgagcagtaccagggccttccgcagtggcttgccaattacgttgtatataatcgccacagtgaggctagcgagattacaaagtgggagtcgccggatgagctggataactatattcgtagctttaaacagtactcgttgcgtaaccccattgtcgaacaagtgagcttagagaccttacgtgttgtccgcgatttatggaccgagctgcagaaggaaggacagactatcgatgagattcacttagagatgggacgtgatctgaagaatacggcggaagagcgcagccgcatcttccgtcgtaatagtgaaaatgaggacacgatcttccgcattaaactgttattagaggaattctatgcgaatgagaaggatatcaaggatgttcgtccgtacagtccgtctcagcaggaattgttgcgtatttatgaggaaggtgtctggcagcaggagaaggacatcccacaggatattaaagatatcaagaagcgcatcagcaatgataaagatatcaaggatattaccccgaatgatattcagcgttatcgcatttggatggaccaaaagtactgctcaccgtatacggggaagaccattccgcttagccgcttgtttacaactgattatgagattgagcatgtaatcccccgcagtcgttacttcgatgatagctacaacaacaaagtgatttgtgaggcggcggttaataaggataagaataatcgtttagggatggagtatattatggccgcgggcggtaagacaatcgagctgggaaatggcaagaatgtgcagatcttaaaagaggaagagtatgtcgagttggtggataagattttcggtagtaatacccgtaaacgtaatattatgttggccgatgagattactgaggaattttctcaccgtcaattaaatgatacgcgttacatcgcacgctttatgaaaggtattttgtcaaatattgttcgtgaaaagaacgctgaggggactctcgagccggaagagacgtcaaagaaccttatcgtatgcagcggacgcattacggatcgtgtgaaacaggattggggcttgaatgatatctggaatcacattattaccccacgcttcgagcgcttaaataagaaaactagcagcaatgacttcggtgagtatgtatgtaaagagggaaagcgctactttcagacccgcgtaccgctgaaccttcagaaaggttttaataagaaacgtattgatcaccgtcatcatgcgatggacgcaatcgcaatcgcatgtattaaccgttcaattgtgaattatcttaataacgcagctgcgaatcagactgagcgtgaggatctgcgtcgcgcggtatgtatcccggagcgcaatggtcaaacgaagcgtcagctgcgcagtccgtggcactgcttcgcgcgcgatgccgagaatgcattgcgccagattgtcgtatctttcaaacaaaacttacgtgtggctacgaaggcaactaatagctatgagtgcttcgatacggccagcggaaagaagattcgcaagcatcaatcaaatcgcgagcattatgcgatccgcaagcctctgcataaggacagtgtgtatggcgaggtaattcttacgtcgattgcgagtgtgaacctgaagaaagcgctcctgaaggcggagcgcatcttggataagcgccttaaagaaaagattttcgaacttcgcaagttgtataactacagtaataagcagatcgaagagcacttaaccaaagtatgcattaactgccccgagtggaagaattatgactttaagaaaatcgcagtacgtatcctgagtaatgacgcggacgcaacccatatcgtagcaatccgcaagccactggatgagtcattcgacgaagtgaagattaatacgattactgataccggtattcagaaaatccttctgaatcatttgtcacgctatgcggacgatcccaagaaggcgttcagtcctgagggaattgaggatatgaacgcaaatattgcgtcattgaatggtggcaaacagcacttaccgatttacaaagttcgcgtgtccgagaaggataatggcggatactttccgatcggacagaagggcaaccgcccaaagaagtacgttaccactgcgaaggacacgaatctgttcttcgcagtctacgccgattccaagggtaaacgttcatataaaacgatcgacttacgtaccgctattgagtgtcgcaagcaggggctgagtgtcgcgccttctattaatgagaaaggggataagcttttgtttaccctgagcccgaatgatctggtgtacatgccatcagagggtgaggaagcgaatggcttcgcaattgataataacctgaataaggatcagatttacaaaatggtatccgcgaataataagcagtgtttcttcatcccacatacggttgctgatttcattagtcgcggtgaggagtataactctcacaataaaatcgagttgaccgaggatcgccgtagtattaaggaacactgtgtaccgttgaaggtaaatcgtttgggaaag

SEQ ID NO: 5587 - DNA, 4131 bp, synthetic construct
  misc_feature 1..4131: note = Description of Artificial Sequence: Synthetic polynucleotide
  misc_feature 1..4131: note = MG23-1 sequence codon optimized for E. coli
  source 1..4131: mol_type = other DNA
atgggcaagaagatgtacgttggtttggatatgggtactagttccgttggtctggcagtgacggatgagaactataagttataccgtgttaaaggtaaagactattggtgctctcgtaccttcgacgaagctgacacggcggtggaacgccgcactaatcgtattagccgccgccgtcgccaacgcgaagtggcacgtttggggattttgcgcgaattgttcgcagacgagatcgcaaaggtcgatccgggtttctacgcccgcctggatgaatccaaataccacctggaagatcgcgataacaagcaaccgtacgcaatcttcgccgacaaaggttacaccgacaaggagtattacgcacgttatcccacaatcttccacctgcgttcagaactcattgatagcgataaacctcatgatgtacgtttggtgtacttagcactggcgaatatgtttaagcatcgcggtcacttcctgaatgacagtttatcgagtgacaagccactggcggataccacggaagcctatagcaacttttactatactgcgtccgaactgagtatttcgtttcctgccgaagcacaaccggacagtatcgacgcagcttccctggaagccctgttgggcgataagggagtcagccgtacggacaaagccaagaatatctgtcagtatctggcgattgataagaagacgtcaaaacccctgtacacactgatcaatttaatctgtggcttgaacatcaagctcattgatatttacggggccgagctgatcgatgaggagaataagaagctttcgatcggctttcgtgatagttcgtacgagcaacaagatgcggacggtcgtaaattattaggagagaattacgctattatcgacgcggcgaaggagcttcatgacattggactgctgagcagtatcatgaagggatataagtacctgagccaagcgcgtgtagccctgtacgaggaacacgcggccgacttaaagaaactgaagagtgtgctgaagcgttacgataaagactcgtaccgtaaggtgtttcgttcgatggatgagggcagttattcggcttacatcggttctgttaattctggtacgaaaattcgtcgtggggttaaagatggtagcgcggacacattttgtaagtccatgaagaaggttctggagaaactgccaaaagacgacatggacgttcagtacctgctggcgaaggcgaccgacagttctctcttgccgaagcaactgaccttcgagaatggcgtgatcccgaaccaattacacgcggcagagatgaaagccatccttcgtcaagccgagaagtatttgccgtttctcttagaaaaggatgagtacgacctgactgtgagccaacgtatcattcaattatttacatttcgtattccgtattacgtaggaccgatcggaaagaaccatgcaggcgagaaaggttataacatttgggctactcgtcgcgcaggcgaggaagatggccgcgtgtacccgtggaacttcgagcaaaagatcgatactaaggcagcagcggagaaattcatcgaacgtatggttcgtcattgtacttatattaatggagaacgtacccttccgaagtgtagcttattatacgagaagtatatggtactgaacgaactcaataatctgcgcattaacggggagaagccggcggtgtcagtgaaacaagacatttataccaaactgttttgccgtggcaaacgtgtaacgatgaagatgctgaaagactatctctacaactcgtcccttatcccgtcgaaagaggacgtcgtgatttccgggatcgataatgggtttaatacgtcactgacgagcgtagggaaatttcgtgggatcctgggcgatgcggtgttcgcggatagtaatcaaaagatgattgaagacatcatcttttggggcacagtttacggaaacgataagaaatttctgaaggaacgcattgaagaggtctatggcgatcgccttaaccacgacgagattaagcgcatcttaggctttaactttaacgactggggcaacttaagccgtgagttcctggaactggaaggggagtgcgaatgtggtcgctgttccatcatccaggcccaatggaacacgaaccacaacctgatggaattacttagcgatcaatttaccttcaagaacgaactggagaagaagacgggatcagcggagaaagcgttagcggattggagcatcgacgatttagaggggaagtatctgtctgcgccggttaagcgtatgatttggcaaacgattaagatgttacgcgaagtgtgcgaagttacaggccgtaccccggacaaagtgttcgtcgagatggcgcgtgaagatggtgagaaaggcgctcgtactgtgagtcgtaagaagaaactgttagatctctacgatgccattaagcacgaggagcgtgaattagcaaaggtgtttagcgacgagatcgattctaagactgaggcagactttcgtagtaagaagctctacctctattatctgcaacagggtcgttgcatgtattccggcgacattatccacctgtcagatttaatgaacgataacctgtacgacattgatcacatttaccctcgtcacttcattaaggacgattccctggagaataacctggtactggtaaagaagcaaatcaataatcgtaaacaagacacctttcctattgaacgttcgatccaagaggacatgcgtcccttttggaagtcgcttgccgattcgggattcatttcagcggaaaagtacaaacgcctgactcgtcgcgacgcctttacggacgaagagaaagcggcctttatttcgcgtcaactggtagagacgcgtcaaggcaccaaggcgattgcagacatcctgaagcaagcactgccagacacggagattgtgtacgtcaaggctgggttagtatctgactttcgccaaaagttcgaactttataaagtgcgtgccctcaacgacactcaccatgcgaaggatgcatatttgaatattgtggtgggtaatacttattccaccaaattcacgaacaacccgctcaatttcatcaaggcgggcgctaaacgtccacaagataatcaatttaagtacaacatggataagattttcgattataacgtgattagtcgtggagaacgtgcatggatcgctggttccgacggcagcatctgtacggtgaagaaattcatgagtcgtaacacggtactgatcacccgtaaagcaaaggaagttcatggcgcgctttcaaataaggcgaccatctggggcaagaacgtggcgaaacccggtgcctacttacccgtgaagtcaactgacctgaaagcgcaagacgtaaccaaatatggtggtatcacgagtatcgcgaatagcggctacaccctcgctgaatacaaggttaatggtaagactacgcgtagtcttgaggcgctgccagtgtatctgggtcgtgctgagcaattaaccgaaaagactgtcgtggactatctgtcttcgtccctgcaggaaagttcgaagaagaagatcgaagacattcaggtccgtaaactgtttatcccacaaggttccaaggtgaagatcgatggcttttgctactacctgggcggtaagaccggcgacagcatctacctgaacaacgcagtgcctttgtatttatccagcactagcgaggagtatctgcgtaaactcctgaaggccgtggaaaataacaattataatgagcgcgacaagaatggtcagatcatcctgaccgcgccgaagaatgtccagctgttgtcgtcgatcttcgacaaattacgttcgaaaccgttctccaacaataagtggaacatttatttcagcatcgtgaacggcaaggagaccaaggtggagcaacttttcagtaagctgagcatcgacaaacaggcggaagtaatctcccaaattgtgatttggatcaactcaagccgtcagaatgtgaacctgagcctgatcggcggttcggcgcacagcggcacgcaagcgctcagtaagaccgtgtcgcgtctgaacgagtgtatgctgattagccagtctatcaccggaatttacgaacactctgtggatttattaacaatc

SEQ ID NO: 5588 - DNA, 3075 bp, synthetic construct
  misc_feature 1..3075: note = Description of Artificial Sequence: Synthetic polynucleotide
  misc_feature 1..3075: note = MG1-4 sequence codon optimized for Human
  source 1..3075: mol_type = other DNA
atgaagaagaaagtgttcgcctttgatctgggaaaggccagcattggttactgtgttcgcgatggattcaacatcaatgaagcaaactctataatcatcgataaggaccatgctgagactatgagtctgagagatcgtcggagaatcaagaaaacattagacgcacatcatgccagggaagagtactttaataaagtctggagcggcgtgggcctcaacatactggacaagaacaacaataattttaaaaaagagtttcctagcaaaaatgaggacgtaatttatacttcttgcctgctgcgcatcgctcttctccagaaccaaaagctggaggaatggcagatctacaaagccctgtacaacgcatttcagaggaggggatatgatgtcaacatcgcctggaagagtgtccaaacagatgacgataaggagaacatcgagaggatgaaaaaatacacttgcgagaacgacatagaacttattatctcagacgaatacaagtatccatgctattacgatgcacttcggctcggactgtggaatgaagacgaaccaaccaagcttaaccgttctatcccccagcataattctaataaagtgcgaaccacagaatacgtggccccacgtgaactggtggagaaggaattaaagcagttgtggttaaacgcccagctccagttacctcaattgaattctatatccgccgaagagttcctgtatggcgagtacaagatcccctacggctcatgcgtgcaaaaagaattcaagcagtacagagggactaaaaaagactggcagggggttctctgtcagaagatacctcgcttcgacaaccgcatcattgccaagtgcaagctgcttcccaagaggaatgtgtgcaaagcgaatacaatcgagaatgtgtcatttgtgttactgatgaagctgaagaacctgcgattcaccgtgatctccggagaaaagttacgcctgtctccagtacagatcaagcagatttatgagaactggctggaaaaggtggaggacacttataataaggacctcgagaaggcagaaaagctcgggaaagaaaatcctgagaagagactgaacatcacaatcactcggcaggaaattgagaagataatcggtgaaaaaattatcgacaaaatagaacccatgaaggctgacatctcaggcagatcatctttctgtcgaagagcttgccagattatgaacaaaatcattctggacggcgaactctatcctcagaatgtggatataagcgaattcgtcgaccgggataatgctaagaacggcatcacagaagaagagatccagtctatgctctccaaaattggtgattggaacaatctgtacatccccgataatcgggaggagaatgcgcagaatgcctcaaatagtcgaatcaagacagatatcatgttggggaacattaccaatcctatcgtgcgcaaccgcctgcagatattccgggacctgctcttaaaccttgccgaaaagtacgggacccctgatgaggtgatcttcgaattcgttcgagatggagctgacaacagcttgtatgggtcaaagaaagcccaggacacagagcggtttatgaaacaacaagagaaagagaacgaacagatcataaacgaactcaaggatgctggactctacgtcaatggacagaatcacgcgaatgcaacgtacttcctgatgcacaagctgctgaagtcacaaggaggcaaatgtatttattctggacaaaacatttcccctagtaattacgacgaatgcgagatagaccatatttacccaagaactctcgggggcaatgatgcattgtataacaaagtggtatgctaccgccgcgaaaatcaggataagaaaggtagaactccttacgaatggctcagtcctgactcagacaagtgggcaaattacgtcaaccgtttgaacaagatcaagaagcagcttggtaagaaaaaattcgagctcctgacatccaaaccagaagactgtgaaaaactgatcgaatcttacaacggactcgccgagacgtctcacatcgctcgtgtagcacagcaaatgacagccttcatcttcggatggggactccaaatccagggcgaatcccggaggatcttcgttaataatgggagcagcacatgtgcaatcagaaaacgctacggattaaacaaactgctgggcgataacctcaagaagaaccgcagcaacgataaacaccacgctcttgacgcaatctgtatctctttcagcagggactttaaatacgataaggaaattaagaaagacatcatcaagggattcaacccggagatagtcaagaacgcaattgataagatcatgccctacccttacgctaacgataagcccttcaaggggaacacaaagcctttggaaacgatctacggactgcggacttacggtgataagagttatattactcaacgggtggagctgaacagcatcgacaagaaggctaccaaaatcaagagtatcattgatgagactatcaagaacgacctgttgaataagctgaaggaaaacccgaccgaacaggaatggaaattgatgctccagaattatatccatcctaaaaagcagaccaaggtgaaaaaggttatgatctccgtttcagagggtgaaatcacaaaagactcaaacaacagagaacgcatgggagagtttgttgacttcgggactaagggaactcagcatcagtttaaacattccaaaaggcataaaggacagatcctgtactttaacgagaaaggtgttgtggaggtgatgccggtgtattccaacattaaaacaacagacgtcaaggacaaactgcaaaacatgggctgtaaactgtataacaagggccagatgttttactctgggtgtctggttgacatcccgaagccttttaaggccggatcaaaggagtaccccgcaggtcgttatcagataaagaccattcggtccgacaaagtggcagaacttgaagatgcgtgtggcaataagatcagtacaaatgtcaaatacctggtgccagccgagtttaagaaggttgagtcaaaa

SEQ ID NO: 5589 - DNA, 3177 bp, synthetic construct
  misc_feature 1..3177: note = Description of Artificial Sequence: Synthetic polynucleotide
  misc_feature 1..3177: note = MG1-6 sequence codon optimized for Human
  source 1..3177: mol_type = other DNA
atggaaaaagaaaagaacaaccatgtgtggggttttgatattgggaagggcagtctgggcgaagcagtgcgagtgggcggcgattttaagcacattgcctccgttctgcttgacccggagtttggagaaattaaaaccgccgctctcgcccgcaggcagatgcgcacgcgcaaggcccataaggcaagggaaaaatggctggaggagtgcctggatggaactggagttgagatcttaaagcgtcgtgaggttgggatagttgatggacagtggcggttgatatcaaaaggcgatgaacgcttggagcgggaattcccacccaatggcgaagaagtgtgctataatagtattgccctgcgttgtaaactgctcctgggagagaagctggaaggatggcaagtcttcaaggccttaaattctgcgatccaaaagaggggttacgatgaaaatatcccctggggcgaggctgaagagaagtccagcaagaaggacgaggacgactacgctcaaaagctgtcccagtacgagcgcgagaaaagtgaattgtttgagtctttcgctgacggagagaagtatgatttcccttgtttcttcaaagcatacaaaatggggttgtggagccccgaaaaccccagacgcgttgaggttaggatcgactgcagagctcaaaaagctaagtcctatgttgtagccagaaagtatgttgaaagggaattcgaatgtctggttgaagcggccgccaaatttttccccaagctcaagggccgagcaaagttcatcttgtacggcgtgagcgagactccctacgcgagctattacgggaacatgaggaaaaaattcggtcttaaacgaggcgcggagagcgattggaccgcactcgggcagaaagttccccgattcgataataggattatcgacaagtgcagattgataccacggatgaacgtttgcaaaatccggccactgaacgaggcccgtaacgagaaagatctgttgtactacgaagtgaccttagctttgaagttacttaatcttagattcttccgcaactcaaatatagagcaactcacatttgaagagtttaagaaagcatttgagattgcctccggagccaagtataagatgacgaagactgccatgaaaaaatttctgaagtccatcagcgccactgcactcggagacgactacgccgaaattgaacctcccaaagagtcagggagagcatccttctcacggcctgctatggacattttaaaggaattgattttctctgggatgccccctagagagttctacggacgcaaaattccagagatctccaacaccgacaagaataagggtgtggtggcgagtgatttagattttatcaaactcatgggcgattgtccctggggaggcatttttataccagacgtgcagacttaccagtttgctaacgctgctttccccaatcccgacgctcaaattaataaattgatcggctcacagaataacccgatagttagacatcggttgaccttctttttcgaacgaattaagttcctggaatcaaagtatggagtccccgacaaggtggtgttggagttcgtgcgggacgacttcatgggcgagaaggaaaagaaggagatgagaatcgccatgaaaaagcgggccgaagagaagatgatgattgccaaggatctggacgagcatgggttcaagggcggcaacctccttctgaagatggaattgtatcgtaaacagaacggaatttgtctgtacacaggagacgccctccctcttagtgaactcgcaactctggagatagaacacattgtgcctaggtcccgtggcggacctgacgctcaatacaattacgtgatcacaagggaaaagaccaacaaattgaagggggacaagaccccatacgagtggctcagcagcgatgccaaagaatgggccagctacacagaccgcgtgaatgcatgtgcaaaagcccttggaaagaagcgttgcaggctgttgctggaaaaagacgccgaggagctggtggaaaagtacacagctcttgctgaaaccgcacatattgccaaactggcccaaaagattgtatgtatgcacttcggattccagtttggaggattgagcggaacaaagcgggtcttcaccgttccaggcgctctgacaagtaggatccgtaagttctacggactcgatagaattctccataatgccgcggccgagtcagagaacctgagttttgaagaatttctcaaattcagtgaggacttggaaaagaaaaacaggaaaaacaaaaaacatcacgctctggatgctatgtgtctgtgctttgcccctactggagtggacagccggagggccaagctgggggaaatcctccccgagaaactgcgtagcgagaaagccgccagagagtttttcaagtcctatctggataagatcatgcccgtcgatgttgctccaaagaaacctcggctggaggacggaatctacagcaaaagaatcatcggcgggaaggcctgcatggtgaagaggaataacctggttgatctggcatacaagtcaggcctgaaacctgtcttcgatattccaaccctcatcaagctcgtggataagaaggagaagggaatcatcaatccacagattaggaaaatgattggggaattcgctgccactaaccctgacgagtccgcttggaggaaatggtgtgaggaggtccgtctgcccagtaaaagcgggcttggtgccagggtcctgcgggttctcgtgtactacggcgaggctgacgagtacaaggacctcagcaaagatgggtgcggcgcctacaggaagggagacgggcataagggacaagtggtatgggagtccgtggatggaaagtactatgtcgagcctgtctacgtccacgcctccaaggctggcgtcatggcagccttgaacgcgaatccgaaaaaaaagagaatttgcggaatgttcaatagccactgcacggtagacgtgggagacgtttataacgatcgaggcgattttattttgcccgcaggaagatatatggttaacactatcctgacaacaggcaggtgcgtattaacaaatgcagacggcgaaaaaagaaacccaatcaacattaactaccttatgcgagctgggatgcggcgggtcgaactgtcagagttg

SEQ ID NO: 5590 - DNA, 3402 bp, synthetic construct
  misc_feature 1..3402: note = Description of Artificial Sequence: Synthetic polynucleotide
  misc_feature 1..3402: note = MG3-6 sequence codon optimized for Human
  source 1..3402: mol_type = other DNA
atgtccacagatatgaagaattatcggatcggtgtggacgtgggcgatcggtcagtgggcttggcggctatagaattcgatgacgacggcctccctattcagaagctggccttggtaacattccggcacgatggggggctggatcctaccaaaaataaaactccgatgagccgtaaagagactcgaggaattgccaggcgcacaatgcgcatgaatcgtgagcggaagagaagattaaggaacctcgacaacgtgttagagaatctgggttacagcgtgcccgagggaccagagcccgagacatacgaggcctggacatctagggccctcctggcttccattaagctggcctccgctgacgagctgaatgagcaccttgtcagagccgttaggcacatggctagacaccgcgggtgggctaatccttggtggagcctggatcagctggagaaggccagccaggagccttctgagacttttgagataatccttgcccgtgctcgcgagcttttcggcgagaaggttcctgccaaccccaccctgggtatgttgggggctttagcagctaataacgaggttctcttgcgcccccgtgatgaaaagaagcggaagactggctatgttagaggtactccactcatgtttgcgcaagtccggcagggcgatcagttggctgagcttagacgaatttgcgaagtacaaggcatagaggaccaatacgaagcactgcgcctgggggtgttcgatcataagcacccttatgtgcctaaagagagggtgggcaaagaccctctgaatccgagcacaaacaggaccattcgggcaagtttggagtttcaagaatttaggatcctggactcagttgctaacctccgtgtgaggatcggtagccgggcgaagagagaactcaccgaagcggaatacgacgccgcggttgagttcttgatggattatgccgacaaggaacagccatcctgggccgatgtcgccgagaagataggggtccccggcaatagactcgtggcccccgtgctcgaagatgtccagcaaaagacagccccctatgatcgctccagtgcagcatttgaaaaagcaatgggcaagaagaccgaagccaggcaatggtgggaatccacggacgacgaccagctgaggtccttgttgatagcttttttggtagacgctactaatgataccgaggaagcagccgcggaagcaggcctgtccgagttgtataaaagttggcccgctgaagagcgcgaggccctctccaacatcgattttgaaaagggccgagtggcatattcacaagaaacactgtccaaactgtctgagtatatgcatgagtatcgcgtaggcctgcacgaggcacggaaggctgtattcggggtggacgacacctggcggcctccattagacaagctcgaagaaccaactggtcagccagccgtggatcgcgtcctgaccattcttagaaggtttgtattggattgcgaacgccagtggggccgcccccgcgcgatcacagtggagcacacacggaccggccttatggggccaactcagcggcagaaaatcctgaatgagcagaaaaagaaccgagccgataacgagcgtattcgggatgagttgcgcgagtccggagtggataacccaagccgggctgaggtacgaagacatttgatcgtgcaggagcaggaatgtcagtgtctttattgcgggaccatgatcaccaccacaacctctgaactcgatcacatagtgccacgggcagggggagggtcatccagacgagaaaacctcgccgccgtatgtcgggcctgcaacgctaagaagaagcgagagctcttctacgcttgggccggacctgtgaagagccaagaaaccatcgaaagagtgcgccagttgaaggctttcaaggactctaagaaagccaagatgttcaagaaccagatccgcaggctgaaccagactgaagcagacgaaccaattgacgagcgctctttggcttccacctcctatgctgctgttgctgtcagagaaaggctggaacagcattttaacgagggcctggccctggacgacaagtctcgggtggttcttgacgtgtatgccggggccgtgacccgtgagagtcgtagggctggtggcatagacgaacgcattttgttgagaggggagcgggacaagaaccgttttgatgtgagacatcacgcagtggacgcggccgtgatgaccctgttaaacagatctgtggccctcacgcttgaacagcggtcacagctccgcagaacattttatgagcaaggtctggacaagttagacaggaatcaactcaaacctgaagaagactggcgcgatttcacggggctcgcacccgcctctcaggagaagtttctggaatggcggaaggctgccactatcctgggcgacctcttagcggaggccatcgaagacgactctatcgcggtcgtaagcccacttcgtctgcggccacagaatggaagcgtccacctcgagacaataagcgcagtgaaaaaacaaacgttgggatcagattggcccgccgacgcggtcaaacgtatagtggaccctgagatctacttagcaatgaaggatgccctgggaaagctgaaagagttgcccgaagacagcgctcgctccctggaacttccagatggacgatttgtggaggccgatgacgaggtgcttttttttccagaaaacgcagcaagcattctgactccccgcggagtggccgagatcggaggctccattcaccatgcacgtctgtacggatggctgacgaagaagggtgagttgaaggttgggatgcttagggtttatggagcagagttcccatggttgatgagagagtccggtagcagaaacgtgctgtccatgcctatccaccgcggcagtcagagctttcgggatatgcaggataccacacggaaggcagtggagagtggcgaagctgtcgagttcgcttggatcacccagaatgacgagctcgaatttgaccccgatgactatatcgcccatggcggaaaagatgagttgagacaattcctcggctttatgcctgagtgtcgctggagggttgatggtttcaaaaagaactatcaaattcggatacgccccgctatgctgtccagagagcaactgccatccgatatccagaggaggctggaatcaaagacactgacgaaaaatgaatccctcctgctgaaggctctggataccggcctggtagtggcaattgggggcctgctgccactcgaaacgctgaaggttatccgtaggaacaacctcggattcccccggtggagaggaaacgggaatttgcccacgtccttcgaggtgaggagtagcgctctgagggccctcggagtggagggc

SEQ ID NO: 5591 - DNA, 3393 bp, synthetic construct
  misc_feature 1..3393: note = Description of Artificial Sequence: Synthetic polynucleotide
  misc_feature 1..3393: note = MG3-7 sequence codon optimized for Human
  source 1..3393: mol_type = other DNA
atgagcgaacatactaaatacagaatcggcatcgacgtgggagatcgatctgtgggattagcagccatcgagtttgatgacgatggatttcccctgtcaaacctggcgatggtaacgtataggcacgacggtggactggatcctacgaccaacaaatcacctaaaagcaggaaagagacaaggggtgtggctctccgaacaatgaggatgcggcgcagaaagaaaagccgcctgaaggatctcgacaaaaccctgcgagccctcggatatgtggttcccgcatgtgaggagccccagacatacgaggcttggaaaagcagggccctgctggccacgacaaaggttgagggggcccaagagctgggagaacatctggtacgggcagtgaggcatatggcccgtcatcgcggctggagaaacccatggtggactttcaatcagctggagatcgcgagcaccgctccttcagatacatttgcaaagatccgcgagcgggccgaaaaagaatggcctggagtggtgcccgaggaagccaccctggggatgattggcgcccttgcagcctctaataatgtgttgctgcgccctaggacctaccggaaggatcagccacggcactcaaagaaactgaatgttctgggacaagagcctatcctggtggacaaagtacgccaggaggacctccttgcagagcttcggacaatttgtaaaaagcaagacattgaggatcagtacgagaaattagcgcaggcagtattcgagcagacaaggccctacgttccactggatagggtcggcaaggatcccttgcaaccaaataagtcccgcgcctcacgcgcatccctggagtttcagcgcttccgcattcttgacgctgtggcgcatcttagagtgagggtgggggcgtcagaccgccgggcgctgacagacgaagagcacgataaagccgtccatttcctgatgggctacagtaagaaagacgtgccaacttggggtgatgtggcagacgagattggtgtcgagcccgcccatttaattgccccagtgatcgatgacgtgcgcttgaataaggcgccttatgatcgctccagcaccgaatttgaacagaaaatgaaaaagaagacaagagccagacagtggtgggacgaagctaatctggaatcccgtagtcaactgattctcttagtctctgaccctactgatgagacgatgcgcctcgccgaggtgtccggtctgtatgaggtgttcgagtcctggcctgacgaagaaaaggaggcactcgagggcctcaaggtcgaatctggcagggcagcttactctaccgatactttgaataagcttagcgaccatatgcgactcaaaagaatcgatttacacgaggcccgcaaaattgcgtttggcgttgacgacatgtggcacccaccactggataggatagacgaacccactggacagccgactgtcgatagggtgctgactatcgtgaggcggtttattttcgattgcgaacgcgcttgggggtgtcccgaaaatgttgtgatcgaacatgcgcgcacaggcttgatgggcccggcgcagagggctgacgtcctcaacgagatcgcaaagaacagaaagaaaaatgacaaaattcgagaagatctccgggccggaggaatcaacaaccctacccgcgcagacattcgcagaaatgcgattgtacaggatcaggagagccagtgcctgtactgcggagctacgataggcgtgagctactcagagctcgatcacatcgttcccagagctggcggcggtagttcccgccgggaaaacctcgctgcagtctgccgggcatgtaatgatagtaagaaagatacaccatttgccgtgtgggccaagaataccagtagacccgtgacgttggagggaacaatacagcggcttagggagcttaaagccttcaagcggcctaaggaccggagaatggtggatctgataatacggcgactgaagcagactgaaaaggacgatcccattgatgagcgaagcctggcctctacaagctacgcagctaccgccatcagagagcgcatcgagcagtatttcaatgagaaggctgagaagctcgacttggccaaagtgcatatcgacgtgtattccggatcattgaccagagaatcaaggagggccggggggatcgacaaaatggttcttttaaggggtcagtccgataagaacagattcgatgtgcgacaccatgcaatcgacgccgctgtccttactctgctgaataggtctgtcgcggtcaccctggagcaacgccgactgatcaaacaacagcgggaatattctctcgagaagtcccggagagaaagggataatgtgtggcgcgattttatgggactgggtccggccgcccaggaaaagtttgccaagtggaagaagactgcttacgtgctggccgatatcatcaaagaggcaatttcaaatgacgcaatccctgttgtcagccccctccggctgcgtcctcaaaatggatctgtgcaccttgacaccgttgatgccgtgctcgaaagaactattggcgatgcatggactgtcgaccaggtgcatcggatagtcaacccacagatctatctggcctttgccggatacttgggaaatcagaaggccctggaccctgacagcagcagagtccttgccttaaacgacggcaggaaactcacagcggaagacgtgatctatgtgttccctgagaaagccgcctccattttaacccctaggggagtcgtaaaaataggggagagcgtacatcacgtgcggctgtacgcttggaagaataggaaggggaaagcagaggtcgggatgctcagagtgtttggcgcagagtttccttggctgatgcgagagagcggggtaaaagatgtgctcagggtacctattcatacgggcagtcagtcctacagagacttgtcctttactgtgcgcaagaacatagaaaaaggcgaggcggccgagattggatggttgacacaaaacgaggagcttgagttcaatcctgaaagctacttgcaggaaggaggcaaagataaactggctaaattcctcgcatttctccccgagactcgctggcgcgttgatgggtttcctatgcccgataagcttcggattcggcctgctcttctctcacgcgaggaaatcccagaaggtgtgttccggaccgaagaacagagtcttctggaagaggctctcaccaaggggctgataattgcaactaaagggctcttgtctctccctgacgtgaaagtcttgcgccggaacaacctcggcattccgcggtggcggggtggatcctacagacccgtttccctggatatccagagggccgcactggcagctctggatgaacaggag

SEQ ID NO: 5592 - DNA, 960 bp, unidentified
  misc_feature 1..960: note = Description of Unknown: uncultivated organism with predicted taxonomy: unclassified Verrucomicrobia
  misc_feature 1..960: note = MG1-1 species 16S rRNA gene
  source 1..960: mol_type = other DNA
acggagagtttgattctggctcagaacgaacgctggcggcgtggataagacatgcaagtcgagcgggatacacagggtagcaatattctgtgtgttcagcggcgcaagggtgcgtaacacgtgggtaatttgccatgaagtctggaataacttgctgaaaggcgagctaatgccggatgtgacttccgaaaggcatcttttggaattcaaagttggggaccttaaccggcctgacgctttttgataagcccgcggtctatcagctagttggtgaggtaacggctcaccaaggctaagacggatagctggtctgagaggacgaccagccacactggaactgagacacggtccagacacctacgggtggcagcagtcgagaatttttcacaatgggcgaaagcctgatggagcgacgccgcgtgggggatgaatggcttcggcccgtaaacccctgtcatttgcgaacaaaccttactggtaaacaaccagtgagctgattgtagcggaagaggaagggacggctaactctgtgccagcagccgcggtaatacagaggtcccgagcgttgttcggattcactgggcgtaaagggtgcgtaggtggtgaggtaagtcggatgtgaaatctccgggctcaacccggaaatggcattggaaactaccttgcttgaggatttgaggggggattagaatacttggtgtagaagtgaaatgcgtagatatcaagtggaacaccagtggcgaaggcgaatccctggaaaatacctgacactgaggcacgaaagctaggggagcaaacaggatgagataccctggtagtcctagccctaaacggtgcttgcttgctgtaagaggaatcgacccctcttgtggcggagctaacgcgttaagcaagccgcctgggaagtacggtcgcaagattaaaactcaaagaaattgacgggggcctgcacaagcggtg

SEQ ID NO: 5593 - DNA, 1527 bp, unidentified
  misc_feature 1..1527: note = Description of Unknown: uncultivated organism with predicted taxonomy: unclassified Verrucomicrobia
  misc_feature 1..1527: note = MG1-2 species 16S rRNA gene
  source 1..1527: mol_type = other DNA
tcggagagtttgattctggctcagaacgaacgctggcggcgtggataagacatgcaagtcgaacgggatcattccggttggcaacaatcggggtgattcagtggcgaacgggtgcgtaacacgtgggaatctgcccggaagagggggatagcccgccgaaaggcggattaataccgtatatattgaaagtgggggaccgcaaggcctcacacttccggatgagcccgcgtcctatcagctagttggtggggtaatggcccaccaaggctttgacgggtagctggtctgagaggacgaccagccacactgggactgagacacggcccagacacctacgggtggcagcagtcgagaatttttcacaatgggggaaaccctgatggagcgacgccgcgtggaggatgaagggcttcggctcgtaaactcctgtcaccacagacaaatgattcacggtgaacatccgtgaagcttgatggtatgtggagaggaagggacggctaactctgtgccagcagccgcggtaatacagaggtcccaagcgttgttcggatttactgggcgtaaagggtgcgtaggaggtctggaaagtcgggtgtgaaatctcaccgcctaacggtgaaattgcgctcgaaactcccagactcgaggaccggagaggagaacggaattcctggtgtagcggtgaaatgcgtagatatcaggaggaacaccaacggcgaaggcagttctctggaaggttcctgactctgaggcacgaaggccaggggagcaaacgggattagataccccggtagtcctggcagtaaacggtgctcattaggtgtaggcggattcgaccccgtctgtgccgcagctaacgcgttaaatgagccgcctggggagtacggtcgcaagattaaaactcaaagaaattgacgggggcccgcacaagcggtggagtatgtggcttaattcgatgcaacgcgaagaaccttacctggtcttgacatgcattgttcatccgtggaaacacggtggcccgcaagggcgaattgcacaggtgctgcatggctgtcgtcagctcgtgtcgtgagatgttgggttaagtcccgcaacgagcgcaacccctatgattagttatatgcgcaagctcactagtcagactgccctgttcaacggggaggaaggtggggatgacgtcaagtcaggatggcccttatgaccagggctgcacacgtactacaatgcccactacagagggtcgcgaagccgtgaggtggagccaatcccagaaaagtgggcccagttcggatcggaggctgcaactcgcctccgtgaagttggaatcgctagtaatggcgcatcagctacggcgccgtgaatacgttcccgggccttgtacacactgcccgtcacatcatgaaagccggttgtacccgaagtcgtttggctaaccgcaaggaggccggcgcctaaggtatggctggtgattgggatgaagtcgtaacaaggtagccgtaggggaacctgcggctggatcacctcctt

SEQ ID NO: 5594 - DNA, 1472 bp, unidentified
  misc_feature 1..1472: note = Description of Unknown: uncultivated organism
  misc_feature 1..1472: note = MG1-3 species 16S rRNA gene
  source 1..1472: mol_type = other DNA
taagagtttgatcctggctcaggattaacgctggcgggatgcctaacacatgcaagtcgagcggcagcacttcgggtggcgagcggcggacggctgaggaacacgttggtacctgccccaaactcagggataagccttcgaaaggaggtctaataccggatatccggaaacgggaaagatttatcggtttgggaggggcctgcgtcgtatcatgcttgttggtggggtaatggctcaccaaggctttgacgcgtatctggtgtgagagcatgaccagacagagtgggactgagacacggcccacactcctacgggaggcagcagtgaggaattttccgcaatggacgaaagtctgacggagcaatcccgcgtggaggacgacacctttcggggcgtaaactccttttctgagggaagaaattttgacggtacctcaggaataagcatcggctaactacgtgccagcagccgcggtaatacgtaggatgcaagcgttatccggaattactgggcgtaaagcgttcgaaggtggtgatatcagtctggtgttaaatccctgcggctcaaccgaggaatcgtaccggatactgtatcactagaggaatgcagaggaagctggaattcccattgtaggggtaaaatccgtagataatgggaggaacaccaaaagcgaaggcaggcttctgggcatttcctgacactgcgcgaacgaaagcgtggggagcgaaagggattagatacccctgtagtccacgccctaaacgatgatcactcgatatacgccggctcaatcccggtgtgtgtccaagctaacgcgttaagtgatccgcctgtggagtacggccgcaaggctaaaacataaaggaatagacggggatccacacaagcggtggagcatggggtttaattcgacagtaagcgaggaaccttaccaagacttgacatctttcgaattttctagaaatagaaaagtgccttcgggaacgaaatgacaggtgctgcatggttgtcgtcagctcgtgccttgaggtgtgcggttaagtccgtgaacgagcgcaaccctcgtcgtgtgttgtatttttcacacgagactgcccgttttacgcgggaggaaggtgaggatgacgtcaaatcagcatggcccttatgtcttgggcgacacccgtgctacaatggccggtacaaagggcagccaacccgcgagggggagcgaatcccaaaaagccggtctcagttcggattgaagtctgcaactcgacttcatgaagctggaatcgctagtaaccgtgaatcagccacgtcacggtgaatatgttcctggatcttgtactcaccgcccgtcaagtcacgaaaggtgggggcgcccgaagccgtgttatcccctcggggagcatgaccacggtgaaaccactgattgggactaagtcgtaacaaggtatccgtaggggaatctgcggatggatcacctcctt

SEQ ID NO: 5595 - DNA, 1542 bp, unidentified
  misc_feature 1..1542: note = Description of Unknown: uncultivated organism with predicted taxonomy: unclassified Verrucomicrobia
  misc_feature 1..1542: note = MG1-6 species 16S rRNA gene
  source 1..1542: mol_type = other DNA
acggagagtttgattctggctcagagtgaacgctggcggcgtggttaagacatgcaagtcgagcgagaacaaaagcgtagcaatacgtggatgagaaagcggcgaacgggtgcgtaacacgtaagcaacctgccctaaagacggggatagctcggggaaactcgaattaataccggatgtggtccttaaacacatgtaagaggaactaaagcttgagaaggcgctttaggaggggcttgcggcctatcagctagttggtaaggtaacggcttaccaaggcaaagacgggtagcgggtctgagaggacgatccgccacactggaactgagacacggtccagacacctacgggtggcagcagtttcgaatcattcacaatgggggcaaccctgatggtgcaacgccgcgtgggggacgaaggtcttcggattgtaaacccctgtcacacaggactaaccgcaaggttcatagccttgtctgaattaactgtgagaggaagtagtggctaactccgtgccagcagccgcggtaatacggagactacgagcgttactcggattcactgggcgtaaagggagcgcaggcgggatagtgtgttaggtgtgaaatgccggggcttaacttcggagctgcgcctaaaactattattctagagtgctggagaggtaagcggaatttccggtgtagcggtaaaatgcgcagatatcggaaggaacaccgaaggcgaaggcagcttactggacagaaactgacgctcatgctcgaaagcgtggggagcgaaagggattagatacccctgtagtccacgccctaaacgttgtacactaggtattggaggaatcatccccttcagtgccccagctaacgcgataagtgtaccgcctgaggactacgaccgcaaggttaaaactcaaagaaattgacgggggcccgcacaagcggtggagcatgtggcttaattcgatgcaacgcgaagaaccttacctgggtttgacatgtatttgaatatatgtgaaagcatatagtccttcgggacaggtacacagatgctgcatggctgtcgtcagctcgtgtcgtgagatgttcggttaagtccggcaacgagcgcaaccctcgccctatgttaccagcgggtaaagccggggactcttaggggacaagcctgtatacaggcgggaaggtggggatgacgtcaagtcagtatggctcttacatccagggctgcacacgtgctacaatggccgacacagagggatgctacgtcgcgaggcgatgcgaatctcgaaaatcggtctcagttcggattggatgtctgcaactcgactccatgaagccggaatcgctagtaaaggcgtatcagctacgacgccttgaatacgttcccgggccttgtacacaccgcccgtcaagtcatgaaagccggttttgcccgaagttcgtgagctaacccgcgaggggggcagcggcctaaggcaatgctggtgattgggactaagtcgtaacaaggtagccgtaggggaacctgcggctggatcacctcctt

SEQ ID NO: 5596 - RNA, 28 nt, synthetic construct
  misc_feature 1..28: note = Description of Artificial Sequence: Synthetic oligonucleotide
  misc_feature 1..28: note = test target sequence
  source 1..28: mol_type = other RNA
cgtgagccaccacgtcgcaagcctcgac

SEQ ID NO: 5597 - protein, 7 aa, unidentified
  REGION 1..7: note = SV40 NLS
  source 1..7: note = Simian virus 40
PKKKRKV

SEQ ID NO: 5598 - protein, 16 aa, Homo sapiens
  REGION 1..16: note = nucleoplasmin bipartite NLS
KRPAATKKAGQAKKKK

SEQ ID NO: 5599 - protein, 9 aa, Homo sapiens
  REGION 1..9: note = c-myc NLS
PAAKRVKLD

SEQ ID NO: 5600 - protein, 11 aa, Homo sapiens
  REGION 1..11: note = c-myc NLS
RQRRNELKRSP

SEQ ID NO: 5601 - protein, 38 aa, Mus sp.
  REGION 1..38: note = hnRNPA1 M9 NLS
NQSSNFGPMKGGNFGGRSSGPYGGGGQYFAKPRNQGGY

SEQ ID NO: 5602 - protein, 42 aa, Homo sapiens
  REGION 1..42: note = Importin-alpha IBB domain NLS
RMRIZFKNKGKDTAELRRRRVEVSVELRKAKKDEQILKRRNV

SEQ ID NO: 5603 - protein, 8 aa, synthetic construct
  REGION 1..8: note = Myoma T protein NLS
VSRKRPRP

SEQ ID NO: 5604 - protein, 8 aa, synthetic construct
  REGION 1..8: note = Myoma T protein NLS
PPKKARED

SEQ ID NO: 5605 - protein, 8 aa, Homo sapiens
  REGION 1..8: note = p53 NLS
PQPKKKPL

SEQ ID NO: 5606 - protein, 12 aa, Mus sp.
  REGION 1..12: note = mouse c-abl IV NLS
SALIKKKKKMAP

SEQ ID NO: 5607 - protein, 5 aa, synthetic construct
  REGION 1..5: note = influenza virus NS1 NLS
DRLRR

SEQ ID NO: 5608 - protein, 7 aa, synthetic construct
  REGION 1..7: note = influenza virus NS1 NLS
PKQKKRK

SEQ ID NO: 5609 - protein, 10 aa, Hepatitis delta virus
  REGION 1..10: note = Hepatitis virus delta antigen NLS
RKLKKKIKKL

SEQ ID NO: 5610 - protein, 10 aa, Mus sp.
  REGION 1..10: note = mouse Mx1 protein NLS
REKKKFLKRR

SEQ ID NO: 5611 - protein, 20 aa, Homo sapiens
  REGION 1..20: note = human poly(ADP-ribose) polymerase NLS
KRKGDEVDGVDEVAKKKSKK

SEQ ID NO: 5612 - protein, 17 aa, Homo sapiens
  REGION 1..17: note = steroid hormone receptors glucocorticoid NLS
RKCLQAGMNLEARKTKK

SEQ ID NO: 5613 - protein, 1053 aa, Staphylococcus aureus
  REGION 1..1053: note = J7RUA5_CAS9_STAAU (aligned to MG1-2, 6)
MKRNYILGLDIGITSVGYGIIDYETRDVIDAGVRLFKEANVENNEGRRSKRGARRLKRRRRHRIQRVKKLLFDYNLLTDHSELSGINPYEARVKGLSQKLSEEEFSAALLHLAKRRGVHNVNEVEEDTGNELSTKEQISRNSKALEEKYVAELQLERLKKDGEVRGSINRFKTSDYVKEAKQLLKVQKAYHQLDQSFIDTYIDLLETRRTYYEGPGEGSPFGWKDIKEWYEMLMGHCTYFPEELRSVKYAYNADLYNALNDLNNLVITRDENEKLEYYEKFQIIENVFKQKKKPTLKQIAKEILVNEEDIKGYRVTSTGKPEFTNLKVYHDIKDITARKEIIENAELLDQIAKILTIYQSSEDIQEELTNLNSELTQEEIEQISNLKGYTGTHNLSLKAINLILDELWHTNDNQIAIFNRLKLVPKKVDLSQQKEIPTTLVDDFILSPVVKRSFIQSIKVINAIIKKYGLPNDIIIELAREKNSKDAQKMINEMQKRNRQTNERIEEIIRTTGKENAKYLIEKIKLHDMQEGKCLYSLEAIPLEDLLNNPFNYEVDHIIPRSVSFDNSFNNKVLVKQEENSKKGNRTPFQYLSSSDSKISYETFKKHILNLAKGKGRISKTKKEYLLEERDINRFSVQKDFINRNLVDTRYATRGLMNLLRSYFRVNNLDVKVKSINGGFTSFLRRKWKFKKERNKGYKHHAEDALIIANADFIFKEWKKLDKAKKVMENQMFEEKQAESMPEIETEQEYKEIFITPHQIKHIKDFKDYKYSHRVDKKPNRELINDTLYSTRKDDKGNTLIVNNLNGLYDKDNDKLKKLINKSPEKLLMYHHDPQTYQKLKLIMEQYGDEKNPLYKYYEETGNYLTKYSKKDNGPVIKKIKYYGNKLNAHLDITDDYPNSRNKVVKLSLKPYRFDVYLDNGVYKFVTVKNLDVIKKENYYEVNSKCYEEAKKLKKISNQAEFIASFYNNDLIKINGELYRVIGVNNDLLNRIEVNMIDITYREYLENMNDKRPPRIIKTIASKTQSIKKYSTDILGNLYEVKSKKHPQIIKKG

SEQ ID NO: 5614 - protein, 1101 aa, Actinomyces naeslundii
  REGION 1..1101: note = J3F2B0_CAS9_ACTNH_4ogc (aligned to MG3)
MWYASLMSAHHLRVGIDVGTHSVGLATLRVDDHGTPIELLSALSHIHDSGVGKEGKKDHDTRKKLSGIARRARRLLHHRRTQLQQLDEVLRDLGFPIPTPGEFLDLNEQTDPYRVWRVRARLVEEKLPEELRGPAISMAVRHIARHRGWRNPYSKVESLLSPAEESPFMKALRERILATTGEVLDDGITPGQAMAQVALTHNISMRGPEGILGKLHQSDNANEIRKICARQGVSPDVCKQLLRAVFKADSPRGSAVSRVAPDPLPGQGSFRRAPKCDPEFQRFRIISIVANLRISETKGENRPLTADERRHVVTFLTEDSQADLTWVDVAEKLGVHRRDLRGTAVHTDDGERSAARPPIDATDRIMRQTKISSLKTWWEEADSEQRGAMIRYLYEDPTDSECAEIIAELPEEDQAKLDSLHLPAGRAAYSRESLTALSDHMLATTDDLHEARKRLFGVDDSWAPPAEAINAPVGNPSVDRTLKIVGRYLSAVESMWGTPEVIHVEHVRDGFTSERMADERDKANRRRYNDNQEAMKKIQRDYGKEGYISRGDIVRLDALELQGCACLYCGTTIGYHTCQLDHIVPQAGPGSNNRRGNLVAVCERCNRSKSNTPFAVWAQKCGIPHVGVKEAIGRVRGWRKQTPNTSSEDLTRLKKEVIARLRRTQEDPEIDERSMESVAWMANELHHRIAAAYPETTVMVYRGSITAAARKAAGIDSRINLIGEKGRKDRIDRRHHAVDASVVALMEASVAKTLAERSSLRGEQRLTGKEQTWKQYTGSTVGAREHFEMWRGHMLHLTELFNERLAEDKVYVTQNIRLRLSDGNAHTVNPSKLVSHRLGDGLTVQQIDRACTPALWCALTREKDFDEKNGLPAREDRAIRVHGHEIKSSDYIQVFSKRKKTDSDRDETPFGAIAVRGGFVEIGPSIHHARIYRVEGKKPVYAMLRVFTHDLLSQRHGDLFSAVIPPQSISMRCAEPKLRKAITTGNATYLGWVVVGDELEINVDSFTKYAIGRFLEDFPNTTRWRICGYDTNSKLTLKPIVLAAEGLENPSSAVNEIVELKGWRVAINVLTKVHPTVVRRDALGRPRYSSRSNLPTSWTIE

SEQ ID NO: 5615 - protein, 9 aa, unidentified
  REGION 1..9: note = Description of Unknown: uncultivated organism
  REGION 1..9: note = MG1-1 to 1-3 MOTIF
RHHALDAMV

SEQ ID NO: 5616 - protein, 9 aa, unidentified
  REGION 1..9: note = Description of Unknown: uncultivated organism
  REGION 1..9: note = MG1 motif 2.1
KHHALDAMC

SEQ ID NO: 5617 - protein, 9 aa, unidentified
  REGION 1..9: note = Description of Unknown: uncultivated organism
  REGION 1..9: note = MG1 motif 2.2
KHHALDAIC

SEQ ID NO: 5618 - protein, 8 aa, unidentified
  REGION 1..8: note = Description of Unknown: uncultivated organism
  REGION 1..8: note = MG1 motif 3
  MOD_RES 2: note = Any amino acid
PXGFSRPA

SEQ ID NO: 5619 - protein, 8 aa, unidentified
  REGION 1..8: note = Description of Unknown: uncultivated organism
  REGION 1..8: note = MG1 motif 4
  MOD_RES 2: note = Any amino acid
PXGFCRPA

SEQ ID NO: 5620 - protein, 8 aa, unidentified
  REGION 1..8: note = Description of Unknown: uncultivated organism
  REGION 1..8: note = MG1 motif 5
  MOD_RES 2: note = Any amino acid
PXGYCRPA

SEQ ID NO: 5621 - protein, 8 aa, unidentified
  REGION 1..8: note = Description of Unknown: uncultivated organism
  REGION 1..8: note = MG1 motif 6
  MOD_RES 2: note = Any amino acid
PXGYSRPA

SEQ ID NO: 5622 - protein, 10 aa, unidentified
  REGION 1..10: note = Description of Unknown: uncultivated organism
  REGION 1..10: note = MG1 motif 7
  MOD_RES 8..9: note = Any amino acid
PIVRHRLXXF

SEQ ID NO: 5623 - protein, 10 aa, unidentified
  REGION 1..10: note = Description of Unknown: uncultivated organism
  REGION 1..10: note = MG1 motif 8
  MOD_RES 8..9: note = Any amino acid
PVVRHRLXXF

SEQ ID NO: 5624 - protein, 10 aa, unidentified
  REGION 1..10: note = Description of Unknown: uncultivated organism
  REGION 1..10: note = MG1 motif 9
  MOD_RES 8..9: note = Any amino acid
PLVRHRLXXF

SEQ ID NO: 5625 - protein, 13 aa, unidentified
  REGION 1..13: note = Description of Unknown: uncultivated organism
  REGION 1..13: note = MG1 motif 10
  MOD_RES 5: note = Any amino acid
  MOD_RES 10: note = Any amino acid
FKALXSAIQXRGY

SEQ ID NO: 5626 - protein, 13 aa, unidentified
  REGION 1..13: note = Description of Unknown: uncultivated organism
  REGION 1..13: note = MG1 motif 11
  MOD_RES 5: note = Any amino acid
  MOD_RES 10: note = Any amino acid
FKALXNAIQXRGY

SEQ ID NO: 5627 - protein, 13 aa, unidentified
  REGION 1..13: note = Description of Unknown: uncultivated organism
  REGION 1..13: note = MG1 motif 12
  MOD_RES 5: note = Any amino acid
  MOD_RES 10: note = Any amino acid
YKALXSAIQXRGY

SEQ ID NO: 5628 - protein, 13 aa, unidentified
  REGION 1..13: note = Description of Unknown: uncultivated organism
  REGION 1..13: note = MG1 motif 13
  MOD_RES 5: note = Any amino acid
  MOD_RES 10: note = Any amino acid
YKALXNAIQXRGY

SEQ ID NO: 5629 - protein, 7 aa, unidentified
  REGION 1..7: note = Description of Unknown: uncultivated organism
  REGION 1..7: note = MG1 motif 14
LKLLNLR

SEQ ID NO: 5630 - protein, 7 aa, unidentified
  REGION 1..7: note = Description of Unknown: uncultivated organism
  REGION 1..7: note = MG1 motif 15
MKLLNLR

SEQ ID NO: 5631 - protein, 11 aa, unidentified
  REGION 1..11: note = Description of Unknown: uncultivated organism
  REGION 1..11: note = MG1, MG2 motif 1
  MOD_RES 4: note = Any amino acid
  MOD_RES 9..10: note = Any amino acid
PRFXNRIIXXC

SEQ ID NO: 5632 - protein, 11 aa, unidentified
  REGION 1..11: note = Description of Unknown: uncultivated organism
  REGION 1..11: note = MG1, MG2 motif 2
  MOD_RES 4: note = Any amino acid
  MOD_RES 9..10: note = Any amino acid
PRFXNRILXXC

SEQ ID NO: 5633 - protein, 7 aa, unidentified
  REGION 1..7: note = Description of Unknown: uncultivated organism
  REGION 1..7: note = MG2 motif 1
NNHLVRH

SEQ ID NO: 5634 - protein, 7 aa, unidentified
  REGION 1..7: note = Description of Unknown: uncultivated organism
  REGION 1..7: note = MG2 motif 2
NNHLIRH

SEQ ID NO: 5635 - protein, 7 aa, unidentified
  REGION 1..7: note = Description of Unknown: uncultivated organism
  REGION 1..7: note = MG2 motif 3
NNHIVRH

SEQ ID NO: 5636 - protein, 7 aa, unidentified
  REGION 1..7: note = Description of Unknown: uncultivated organism
  REGION 1..7: note = MG2 motif 4
  MOD_RES 4: note = Any amino acid
EFLXFRW

SEQ ID NO: 5637 - protein, 7 aa, unidentified
  REGION 1..7: note = Description of Unknown: uncultivated organism
  REGION 1..7: note = MG2 motif 5
  MOD_RES 4: note = Any amino acid
EFLXYRW

SEQ ID NO: 5638 - protein, 7 aa, unidentified
  REGION 1..7: note = Description of Unknown: uncultivated organism
  REGION 1..7: note = MG2 motif 6
  MOD_RES 4: note = Any amino acid
EFMXFRW

SEQ ID NO: 5639 - protein, 8 aa, unidentified
  REGION 1..8: note = Description of Unknown: uncultivated organism
  REGION 1..8: note = MG3 motif 1
EPQTYEAW

SEQ ID NO: 5640 - protein, 8 aa, unidentified
  REGION 1..8: note = Description of Unknown: uncultivated organism
  REGION 1..8: note = MG3 motif 2
EPETYEAW

SEQ ID NO: 5641 - protein, 9 aa, unidentified
  REGION 1..9: note = Description of Unknown: uncultivated organism
  REGION 1..9: note = MG3 motif 3
HLVRAVRHM

SEQ ID NO: 5642 - protein, 8 aa, unidentified
  REGION 1..8: note = Description of Unknown: uncultivated organism
  REGION 1..8: note = MG3 motif 4
  MOD_RES 4: note = Any amino acid
MRMXRRKK

SEQ ID NO: 5643 - protein, 8 aa, unidentified
  REGION 1..8: note = Description of Unknown: uncultivated organism
  REGION 1..8: note = MG3 motif 5
MRMRRRRK

SEQ ID NO: 5644 - protein, 8 aa, unidentified
  REGION 1..8: note = Description of Unknown: uncultivated organism
  REGION 1..8: note = MG3 motif 6
  MOD_RES 2..3: note = Any amino acid
NXXLLRPR

SEQ ID NO: 5645 - protein, 15 aa, unidentified
  REGION 1..15: note = Description of Unknown: uncultivated organism
  REGION 1..15: note = MG3 motif 7
  MOD_RES 2: note = Any amino acid
  MOD_RES 13..14: note = Any amino acid
QXDVLAELRRICXXQ

SEQ ID NO: 5646 - protein, 15 aa, unidentified
  REGION 1..15: note = Description of Unknown: uncultivated organism
  REGION 1..15: note = MG3 motif 8
  MOD_RES 2: note = Any amino acid
  MOD_RES 13..14: note = Any amino acid
QXDLLAELRTICXXQ

SEQ ID NO: 5647 - protein, 15 aa, unidentified
  REGION 1..15: note = Description of Unknown: uncultivated organism
  REGION 1..15: note = MG3 motif 9
  MOD_RES 2: note = Any amino acid
  MOD_RES 13..14: note = Any amino acid
QXDQLAELRRICXXQ

SEQ ID NO: 5648 - protein, 11 aa, unidentified
  REGION 1..11: note = Description of Unknown: uncultivated organism
  REGION 1..11: note = MG3 motif 10
  MOD_RES 3..4: note = Any amino acid
VPXXRVGKDPL

SEQ ID NO: 5649 - protein, 10 aa, unidentified
  REGION 1..10: note = Description of Unknown: uncultivated organism
  REGION 1..10: note = MG4 motif 1
  MOD_RES 5: note = Any amino acid
  MOD_RES 8: note = Any amino acid
QQFRXLQXVN

SEQ ID NO: 5650 - protein, 9 aa, unidentified
  REGION 1..9: note = Description of Unknown: uncultivated organism
  REGION 1..9: note = MG14 motif 1
  MOD_RES 2: note = Any amino acid
HXDGTSRAL

SEQ ID NO: 5651 - protein, 9 aa, unidentified
  REGION 1..9: note = Description of Unknown: uncultivated organism
  REGION 1..9: note = MG14 motif 2
  MOD_RES 2: note = Any amino acid
HXNGTSRAL

SEQ ID NO: 5652 - protein, 9 aa, unidentified
  REGION 1..9: note = Description of Unknown: uncultivated organism
  REGION 1..9: note = MG14 motif 3
  MOD_RES 2: note = Any amino acid
HXGGTSRAL

SEQ ID NO: 5653 - protein, 9 aa, unidentified
  REGION 1..9: note = Description of Unknown: uncultivated organism
  REGION 1..9: note = MG14 motif 4
  MOD_RES 2: note = Any amino acid
HXDGSEQAL

SEQ ID NO: 5654 - protein, 7 aa, unidentified
  REGION 1..7: note = Description of Unknown: uncultivated organism
  REGION 1..7: note = MG14 motif 5
  MOD_RES 5: note = Any amino acid
SELVXAY

SEQ ID NO: 5655 - protein, 7 aa, unidentified
  REGION 1..7: note = Description of Unknown: uncultivated organism
  REGION 1..7: note = MG14 motif 6
  MOD_RES 5: note = Any amino acid
SEMVXAY

SEQ ID NO: 5656 - protein, 7 aa, unidentified
  REGION 1..7: note = Description of Unknown: uncultivated organism
  REGION 1..7: note = MG14 motif 7
  MOD_RES 5: note = Any amino acid
SELCXAY

SEQ ID NO: 5657 - protein, 10 aa, unidentified
  REGION 1..10: note = Description of Unknown: uncultivated organism
  REGION 1..10: note = MG14 motif 8
  MOD_RES 5..8: note = Any amino acid
FKGVXXXXEK

SEQ ID NO: 5658 - protein, 10 aa, unidentified
  REGION 1..10: note = Description of Unknown: uncultivated organism
  REGION 1..10: note = MG14 motif 9
  MOD_RES 5..8: note = Any amino acid
FKGIXXXXEK

SEQ ID NO: 5659 - protein, 8 aa, unidentified
  REGION 1..8: note = Description of Unknown: uncultivated organism
  REGION 1..8: note = MG14 motif 10
  MOD_RES 6: note = Any amino acid
LADAVXEA

SEQ ID NO: 5660 - protein, 8 aa, unidentified
  REGION 1..8: note = Description of Unknown: uncultivated organism
  REGION 1..8: note = MG14 motif 11
  MOD_RES 6: note = Any amino acid
LGDAVXEA

SEQ ID NO: 5661 - protein, 8 aa, unidentified
  REGION 1..8: note = Description of Unknown: uncultivated organism
  REGION 1..8: note = MG14 motif 12
  MOD_RES 6..7: note = Any amino acid
EEPEVXXL

SEQ ID NO: 5662 - protein, 8 aa, unidentified
  REGION 1..8: note = Description of Unknown: uncultivated organism
  REGION 1..8: note = MG14 motif 13
  MOD_RES 6..7: note = Any amino acid
EEPEIXXL

SEQ ID NO: 5663 - protein, 8 aa, unidentified
  REGION 1..8: note = Description of Unknown: uncultivated organism
  REGION 1..8: note = MG14 motif 14
  MOD_RES 6..7: note = Any amino acid
EDPEVXXL

SEQ ID NO: 5664 - protein, 11 aa, unidentified
  REGION 1..11: note = Description of Unknown: uncultivated organism
  REGION 1..11: note = MG14 motif 15
  MOD_RES 5: note = Any amino acid
  MOD_RES 7: note = Any amino acid
  MOD_RES 9..10: note = Any amino acid
NPVVXRXMXXM

SEQ ID NO: 5665 - protein, 11 aa, unidentified
  REGION 1..11: note = Description of Unknown: uncultivated organism
  REGION 1..11: note = MG14 motif 16
  MOD_RES 5: note = Any amino acid
  MOD_RES 7: note = Any amino acid
  MOD_RES 9..10: note = Any amino acid
NPVVXRXTXXV

SEQ ID NO: 5666 - protein, 14 aa, unidentified
  REGION 1..14: note = Description of Unknown: uncultivated organism
  REGION 1..14: note = MG14 motif 17
  MOD_RES 2: note = Any amino acid
  MOD_RES 4: note = Any amino acid
  MOD_RES 6..7: note = Any amino acid
  MOD_RES 10: note = Any amino acid
  MOD_RES 12: note = Any amino acid
DXRXYXXVGXCXYF

SEQ ID NO: 5667 - protein, 14 aa, unidentified
  REGION 1..14: note = Description of Unknown: uncultivated organism
  REGION 1..14: note = MG14 motif 18
  MOD_RES 4: note = Any amino acid
  MOD_RES 6..8: note = Any amino acid
  MOD_RES 13: note = Any amino acid
VLYXLXXXRGYIXH

SEQ ID NO: 5668 - protein, 12 aa, unidentified
  REGION 1..12: note = Description of Unknown: uncultivated organism
  REGION 1..12: note = MG15 motif 1
  MOD_RES 2: note = Any amino acid
  MOD_RES 4..6: note = Any amino acid
DXIXXXFSVYKN

SEQ ID NO: 5669 - protein, 10 aa, unidentified
  REGION 1..10: note = Description of Unknown: uncultivated organism
  REGION 1..10: note = MG15 motif 2
YSRACERAGY

SEQ ID NO: 5670 - protein, 8 aa, unidentified
  REGION 1..8: note = Description of Unknown: uncultivated organism
  REGION 1..8: note = MG15 motif 3
VKRSISQT

SEQ ID NO: 5671 - protein, 8 aa, unidentified
  REGION 1..8: note = Description of Unknown: uncultivated organism
  REGION 1..8: note = MG15 motif 4
VKRAISQT

SEQ ID NO: 5672 - protein, 13 aa, unidentified
  REGION 1..13: note = Description of Unknown: uncultivated organism
  REGION 1..13: note = MG15 motif 5
  MOD_RES 9: note = Any amino acid
  MOD_RES 12: note = Any amino acid
KACYKILPXLEXG

SEQ ID NO: 5673 - protein, 13 aa, unidentified
  REGION 1..13: note = Description of Unknown: uncultivated organism
  REGION 1..13: note = MG15 motif 6
  MOD_RES 9: note = Any amino acid
  MOD_RES 12: note = Any amino acid
KACYKLLPXLEXG

SEQ ID NO: 5674 - protein, 8 aa, unidentified
  REGION 1..8: note = Description of Unknown: uncultivated organism
  REGION 1..8: note = MG15, MG21 motif 1
  MOD_RES 6: note = Any amino acid
QKLIPXLE

SEQ ID NO: 5675 - protein, 8 aa, unidentified
  REGION 1..8: note = Description of Unknown: uncultivated organism
  REGION 1..8: note = MG15, MG21 motif 2
  MOD_RES 6: note = Any amino acid
RKLIPXLE

SEQ ID NO: 5676 - protein, 16 aa, unidentified
  REGION 1..16: note = Description of Unknown: uncultivated organism
  REGION 1..16: note = MG16 motif 1
  MOD_RES 2..4: note = Any amino acid
  MOD_RES 7..8: note = Any amino acid
  MOD_RES 11..12: note = Any amino acid
WXXXKAXXKGXXGNTT

SEQ ID NO: 5677 - protein, 16 aa, unidentified
  REGION 1..16: note = Description of Unknown: uncultivated organism
  REGION 1..16: note = MG16 motif 2
  MOD_RES 2..4: note = Any amino acid
  MOD_RES 7..8: note = Any amino acid
  MOD_RES 11..12: note = Any amino acid
WXXXKAXXKGXXGNAT

SEQ ID NO: 5678 - protein, 16 aa, unidentified
  REGION 1..16: note = Description of Unknown: uncultivated organism
  REGION 1..16: note = MG16 motif 3
  MOD_RES 2..4: note = Any amino acid
  MOD_RES 7..8: note = Any amino acid
  MOD_RES 11..12: note = Any amino acid
WXXXRAXXKGXXGNTT

SEQ ID NO: 5679 - protein, 14 aa, unidentified
  REGION 1..14: note = Description of Unknown: uncultivated organism
  REGION 1..14: note = MG18 motif 1
WITLFCDEKKMLVT

SEQ ID NO: 5680 - protein, 11 aa, unidentified
  REGION 1..11: note = Description of Unknown: uncultivated organism
  REGION 1..11: note = MG18 motif 2
HTNKNFMELLS

SEQ ID NO: 5681 - protein, 11 aa, unidentified
  REGION 1..11: note = Description of Unknown: uncultivated organism
  REGION 1..11: note = MG18 motif 3
HTNKNLMELLS

SEQ ID NO: 5682 - protein, 20 aa, unidentified
  REGION 1..20: note = Description of Unknown: uncultivated organism
  REGION 1..20: note = MG18 motif 4
IKAIKKLKYKDWGRLSATLL

SEQ ID NO: 5683 - protein, 21 aa, unidentified
  REGION 1..21: note = Description of Unknown: uncultivated organism
  REGION 1..21: note = MG18 motif 5
CTYLVGEDVLPKESLLYSEFM

SEQ ID NO: 5684 - protein, 18 aa, unidentified
  REGION 1..18: note = Description of Unknown: uncultivated organism
  REGION 1..18: note = MG18 motif 6
TVDGERLPVDVLEKIFKQ

SEQ ID NO: 5685 - protein, 17 aa, unidentified
  REGION 1..17: note = Description of Unknown: uncultivated organism
  REGION 1..17: note = MG18 motif 7
  MOD_RES 11: note = Any amino acid
EQGRCWVVRKXEKIYPW

SEQ ID NO: 5686 - protein, 11 aa, unidentified
  REGION 1..11: note = Description of Unknown: uncultivated organism
  REGION 1..11: note = MG18 motif 8
QNIGGIDDKIN

SEQ ID NO: 5687 - protein, 10 aa, unidentified
  REGION 1..10: note = Description of Unknown: uncultivated organism
  REGION 1..10: note = MG21 motif 1
  MOD_RES 4..5: note = Any amino acid
  MOD_RES 7: note = Any amino acid
SYHXXRXALD

SEQ ID NO: 5688 - protein, 22 aa, unidentified
  REGION 1..22: note = Description of Unknown: uncultivated organism
  REGION 1..22: note = MG21 motif 2
  MOD_RES 5: note = Any amino acid
  MOD_RES 11: note = Any amino acid
  MOD_RES 15: note = Any amino acid
  MOD_RES 19..21: note = Any amino acid
NPVVXRAVSQXIKVXNAVXXXY

SEQ ID NO: 5689 - protein, 20 aa, unidentified
  REGION 1..20: note = Description of Unknown: uncultivated organism
  REGION 1..20: note = MG21 motif 3
  MOD_RES 5..6: note = Any amino acid
  MOD_RES 8: note = Any amino acid
  MOD_RES 11: note = Any amino acid
  MOD_RES 14: note = Any amino acid
  MOD_RES 17: note = Any amino acid
CTFEXXEXRAXKAXYTXEYF

SEQ ID NO: 5690 - protein, 14 aa, unidentified
  REGION 1..14: note = Description of Unknown: uncultivated organism
  REGION 1..14: note = MG21 motif 4
  MOD_RES 3: note = Any amino acid
  MOD_RES 6..7: note = Any amino acid
  MOD_RES 10: note = Any amino acid
YDXACXXVYXDHRG

SEQ ID NO: 5691 - protein, 14 aa, unidentified
  REGION 1..14: note = Description of Unknown: uncultivated organism
  REGION 1..14: note = MG21 motif 5
  MOD_RES 3: note = Any amino acid
  MOD_RES 6..7: note = Any amino acid
  MOD_RES 10: note = Any amino acid
YDXACXXIYXDHRG

SEQ ID NO: 5692 - protein, 6 aa, unidentified
  REGION 1..6: note = Description of Unknown: uncultivated organism
  REGION 1..6: note = MG21 motif 6
KLLQDL

SEQ ID NO: 5693 - protein, 14 aa, unidentified
  REGION 1..14: note = Description of Unknown: uncultivated organism
  REGION 1..14: note = MG21 motif 7
  MOD_RES 2: note = Any amino acid
  MOD_RES 5..6: note = Any amino acid
  MOD_RES 9: note = Any amino acid
  MOD_RES 13: note = Any amino acid
EXAYXXILXSQRXF

SEQ ID NO: 5694 - protein, 11 aa, unidentified
  REGION 1..11: note = Description of Unknown: uncultivated organism
  REGION 1..11: note = MG22 motif 1
  MOD_RES 5: note = Any amino acid
  MOD_RES 8..9: note = Any amino acid
WESPXELXXYI

SEQ ID NO: 5695 - protein, 8 aa, unidentified
  REGION 1..8: note = Description of Unknown: uncultivated organism
  REGION 1..8: note = MG22 motif 2
VEQVSLET

SEQ ID NO: 5696 - protein, 8 aa, unidentified
  REGION 1..8: note = Description of Unknown: uncultivated organism
  REGION 1..8: note = MG22 motif 3
LRVVRDLW

SEQ ID NO: 5697 - protein, 8 aa, unidentified
  REGION 1..8: note = Description of Unknown: uncultivated organism
  REGION 1..8: note = MG22 motif 4
LRVVHDLW

SEQ ID NO: 5698 - protein, 8 aa, unidentified
  REGION 1..8: note = Description of Unknown: uncultivated organism
  REGION 1..8: note = MG22 motif 5
YGAYSKRA

SEQ ID NO: 5699 - protein, 8 aa, unidentified
  REGION 1..8: note = Description of Unknown: uncultivated organism
  REGION 1..8: note = MG22 motif 6
YGAYSDKA

SEQ ID NO: 5700 - protein, 14 aa, unidentified
  REGION 1..14: note = Description of Unknown: uncultivated organism
  REGION 1..14: note = MG23 motif 1
VLKKYDAYDEMFRV

SEQ ID NO: 5701 - protein, 14 aa, unidentified
  REGION 1..14: note = Description of Unknown: uncultivated organism
  REGION 1..14: note = MG23 motif 2
VLKKYNGYDKMFRV

SEQ ID NO: 5702 - protein, 14 aa, unidentified
  REGION 1..14: note = Description of Unknown: uncultivated organism
  REGION 1..14: note = MG23 motif 3
VLKKYDEYDKMFRM

SEQ ID NO: 5703 - protein, 8 aa, unidentified
  REGION 1..8: note = Description of Unknown: uncultivated organism
  REGION 1..8: note = MG23 motif 4
  MOD_RES 6: note = Any amino acid
GKDLWXSR

SEQ ID NO: 5704 - protein, 8 aa, unidentified
  REGION 1..8: note = Description of Unknown: uncultivated organism
  REGION 1..8: note = MG23 motif 5
  VARIANT 6: note = Any amino acid
GKDFWXSR

SEQ ID NO: 5705 - protein, 16 aa, unidentified
  REGION 1..16: note = Description of Unknown: uncultivated organism
  REGION 1..16: note = MG23 motif 6
  VARIANT 12: note = Any amino acid
  VARIANT 14: note = Any amino acid
MVLNELNNLKIXGXKP

SEQ ID NO: 5706 - protein, 16 aa, unidentified
  REGION 1..16: note = Description of Unknown: uncultivated organism
  REGION 1..16: note = MG23 motif 7
  VARIANT 12: note = Any amino acid
  VARIANT 14: note = Any amino acid
TVLNELNNLKIXGXKP

SEQ ID NO: 5707 - protein, 16 aa, unidentified
  REGION 1..16: note = Description of Unknown: uncultivated organism
  REGION 1..16: note = MG23 motif 8
  VARIANT 12: note = Any amino acid
MVLNELNNLRIXGKKP

SEQ ID NO: 5708 - protein, 12 aa, unidentified
  REGION 1..12: note = Description of Unknown: uncultivated organism
  REGION 1..12: note = MG23 motif 9
  VARIANT 2: note = Any amino acid
  VARIANT 10: note = Any amino acid
VXVKQGIYEXLF

SEQ ID NO: 5709 - protein, 12 aa, unidentified
  REGION 1..12: note = Description of Unknown: uncultivated organism
  REGION 1..12: note = MG23 motif 10
  VARIANT 2: note = Any amino acid
  VARIANT 10: note = Any amino acid
VXVKQDIYEXLF

SEQ ID NO: 5710 - protein, 13 aa, unidentified
  REGION 1..13: note = Description of Unknown: uncultivated organism
  REGION 1..13: note = MG23 motif 11
  MOD_RES 7..8: note = Any amino acid
  VARIANT 10..11: note = Any amino acid
GKRVTLXXLXXYL

SEQ ID NO: 5711 - protein, 13 aa, unidentified
  REGION 1..13: note = Description of Unknown: uncultivated organism
  REGION 1..13: note = MG23 motif 12
  VARIANT 7..8: note = Any amino acid
  VARIANT 10..11: note = Any amino acid
GKKVTLXXLXXYL

SEQ ID NO: 5712 - protein, 8 aa, unidentified
  REGION 1..8: note = Description of Unknown: uncultivated organism
  REGION 1..8: note = MG23 motif 13
  VARIANT 4: note = Any amino acid
FTDXNQAM

SEQ ID NO: 5713 - protein, 13 aa, unidentified
  REGION 1..13: note = Description of Unknown: uncultivated organism
  REGION 1..13: note = MG23 motif 14
  VARIANT 7: note = Any amino acid
  VARIANT 10: note = Any amino acid
WGTVYGXDKXFLK

SEQ ID NO: 5714 - protein, 13 aa, unidentified
  REGION 1..13: note = Description of Unknown: uncultivated organism
  REGION 1..13: note = MG23 motif 15
  VARIANT 7: note = Any amino acid
  VARIANT 10: note = Any amino acid
WGTIYGXDKXFLK

SEQ ID NO: 5715 - protein, 13 aa, unidentified
  REGION 1..13: note = Description of Unknown: uncultivated organism
  REGION 1..13: note = MG23 motif 16
  VARIANT 7: note = Any amino acid
  VARIANT 10: note = Any amino acid
WATIYGXDKXFLK

SEQ ID NO: 5716 - protein, 8 aa, unidentified
  REGION 1..8: note = Description of Unknown: uncultivated organism
  REGION 1..8: note = MG23 motif 17
ALELLGDE

SEQ ID NO: 5717 - protein, 8 aa, unidentified
  REGION 1..8: note = Description of Unknown: uncultivated organism
  REGION 1..8: note = MG23 motif 18
AKDILGDE

SEQ ID NO: 5718 - skipped
